(19) United States
(12) Patent Application Publication
(10) Pub. No.: US 2025/0163395 A1
(43) Pub. Date: May 22, 2025

(54) SYSTEMS AND METHODS OF NOVEL CRISPR-CAS PROTEINS FOR IN-VITRO APPLICATIONS

(71) Applicant: Roche Molecular Systems, Inc., Pleasanton, CA (US)

(72) Inventors: He Wang, Pleasanton, CA (US); Yu Tian, Pleasanton, CA (US); Jinshuang Lu, Pleasanton, CA (US); Beiyang Ma, Pleasanton, CA (US); Yan Wei, Pleasanton, CA (US); Xiang Li, Pleasanton, CA (US); Renjian Huang, Pleasanton, CA (US); Fangnian Wang, Pleasanton, CA (US)

(73) Assignee: Roche Molecular Systems, Inc., Pleasanton, CA (US)

(21) Appl. No.: 18/955,601

(22) Filed: Nov. 21, 2024

Related U.S. Application Data
(60) Provisional application No. 63/601,691, filed on Nov. 21, 2023.

(51) Int. Cl. C12N 9/22; C12N 15/11; C12N 15/70; C12Q 1/70

(52) U.S. Cl. CPC C12N 9/22; C12N 15/111; C12N 15/70; C12Q 1/70; C07K 2319/21; C12N 2310/20

(57) ABSTRACT

The present disclosure relates to novel CRISPR enzymes, reaction mixtures, methods of using the same in the detection of microorganisms, such as FluA, FluB, amongst others. The disclosure particularly relates to the discovery of novel functional CRISPR enzyme complexes, particularly systems displaying trans cleavage activity.

### RELATED APPLICATIONS

[0001] This application claims priority under 35 U.S.C. 119 (e) to U.S. Provisional Patent Application Ser. No. 63/601,691, filed 21 Nov. 2023 and titled “Systems and Methods of Novel CRISPR-CAS Proteins for in-vitro applications,” the disclosure of which is hereby incorporated by reference in its entirety.

### REFERENCE TO A SEQUENCE LISTING SUBMITTED AS A TEXT FILE

[0002] The official copy of the sequence listing is submitted electronically via EFS-Web with a file named, “08485-008WO1.xml,” created on Nov. 15, 2024, and having a size of 802 KB kilobytes, and is filed concurrently with the specification. The sequence listing contained in the XML formatted document is part of the specification and is herein incorporated by reference in its entirety.

### FIELD

[0003] The following discussion is merely provided to aid the reader in understanding the disclosure and is not admitted to describe or constitute prior art thereto.

[0004] Comprehending the connection between an enzyme's amino acid composition and its overall purpose remains highly relevant in practical, clinical, and scientific realms for both biologists and engineers. This has become of particular interest in the CRISPR field, where a number of functional CRISPR enzymes have been identified, while others with similar structure appear non-functional. Although directed evolution is a potent instrument for engineering and exploration, the haphazard and frequently combined nature of mutations poses a challenge in assessing their specific effects, complicating further engineering efforts. A more methodical rapid and high throughput workflow may be required when attempting to simultaneously identify functional activity in multiple putative enzyme sequences. This is particular important if the high throughput screen is designed to identify enzymes with very specific activities, or enzymes that only display functional activity in multi-component complexes, including complexes that include CRISPR enzymes and guide nucleic acids.

### SUMMARY

[0005] This Summary is provided to introduce a selection of concepts in a simplified form that are further described below in the Detailed Description. This Summary is not intended to identify key or essential features of the claimed subject matter, nor is it intended to be used to limit the scope of the claimed subject matter. Other features, details, utilities, and advantages of the claimed subject matter will be apparent from the following written Detailed Description including those aspects illustrated in the accompanying drawings and defined in the appended claims.

[0006] Disclosed herein are reaction mixture(s) comprising: a nucleic acid-guided nuclease (CRISPR nuclease) having at least 85% amino acid homology to any one of SEQ ID NOs:1-93; a guide nucleic acid (gRNA) for complexing with the nucleic acid-guided CRISPR nuclease, wherein the gRNA comprises a nucleic acid sequence (“the gRNA sequence”), and wherein the gRNA sequence comprises a direct repeat (e.g., a nucleic acid sequence) having at least 85% nucleic acid homology to any one of SEQ ID NOs:374-466, optionally wherein the gRNA comprises a nucleic acid sequence having at least 85% nucleic acid homology to any one of SEQ ID NOs:94-279, and wherein the gRNA forms a complex with the CRISPR nuclease in the reaction mixture; and a substrate for the complex. In some instances, the nucleic acid-guided CRISPR nuclease has at least 90%, at least 95%, or at least 99% amino acid homology to any one of SEQ ID NOs:1-93. Also disclosed herein are enzyme systems comprising: a nucleic acid-guided CRISPR nuclease having at least 85% amino acid homology to any one of SEQ ID NOs:1-93; and a guide nucleic acid (gRNA) for complexing with the nucleic acid-guided CRISPR nuclease, wherein the gRNA comprises a nucleic acid sequence comprising a direct repeat having at least 85% nucleic acid homology to any one of SEQ ID NOs:374-466, optionally wherein the gRNA comprises a nucleic acid sequence having at least 85% nucleic acid homology to any one of SEQ ID NOs:94-279. In some instances, the reaction mixtures described herein comprise at least one nucleic acid-guided CRISPR nuclease and a direct repeat sequence the “activates” the CRISPR nuclease, when in the presence of a target sequence. Such functional systems can comprise a nucleic acid-guided CRISPR nuclease/gRNA comprising a direct repeat sequence selected from the group consisting of: the CRISPR nuclease/direct repeat pair of SEQ ID NO:22/SEQ ID NO: 395; the CRISPR nuclease/direct repeat pair of SEQ ID NO:62/SEQ ID NO: 435; the CRISPR nuclease/direct repeat pair of SEQ ID NO:80/SEQ ID NO: 453; and/or the CRISPR nuclease/direct repeat pair of SEQ ID NO:91/SEQ ID NO: 464.

[0007] In some instances, the reaction mixture(s) and/or enzyme systems described herein comprise certain CRISPR nuclease/gRNA pairs. In such instances, the homology of the enzyme can be at least 90%, at least 95%, or at least 99% amino acid homology to any one of SEQ ID NOs:1-93. In some instances the nucleic acid-guided CRISPR nuclease and the guide nucleic acid comprise a CRISPR nuclease/gRNA pair selected from the group consisting of: the CRISPR nuclease/gRNA pair of SEQ ID NO:1/SEQ ID NO: 94 or the CRISPR nuclease/gRNA pair of SEQ ID NO:1/SEQ ID NO: 117; the CRISPR nuclease/gRNA pair of SEQ ID NO:2/SEQ ID NO: 95 or the CRISPR nuclease/gRNA pair of SEQ ID NO:2/SEQ ID NO: 118; the CRISPR nuclease/gRNA pair of SEQ ID NO:3/SEQ ID NO: 96 or the CRISPR nuclease/gRNA pair of SEQ ID NO:3/SEQ ID NO: 119; the CRISPR nuclease/gRNA pair of SEQ ID NO:4/SEQ ID NO: 97 or the CRISPR nuclease/gRNA pair of SEQ ID NO:4/SEQ ID NO: 120; the CRISPR nuclease/gRNA pair of SEQ ID NO:5/SEQ ID NO: 98 or the CRISPR nuclease/gRNA pair of SEQ ID NO:5/SEQ ID NO: 121; the CRISPR nuclease/gRNA pair of SEQ ID NO:6/SEQ ID NO: 99 or the CRISPR nuclease/gRNA pair of SEQ ID NO:6/SEQ ID NO: 122; the CRISPR nuclease/gRNA pair of SEQ ID NO:7/SEQ ID NO: 100 or the CRISPR nuclease/gRNA pair of SEQ ID NO:7/SEQ ID NO: 123; the CRISPR nuclease/gRNA pair of SEQ ID NO:8/SEQ ID NO: 101 or the CRISPR nuclease/gRNA pair of SEQ ID NO:8/SEQ ID NO: 124; the CRISPR nuclease/gRNA pair of SEQ ID NO:9/SEQ ID NO: 102 or the CRISPR nuclease/gRNA pair of SEQ ID NO:9/SEQ ID NO: 125; the CRISPR nuclease/gRNA pair of SEQ ID NO:10/SEQ ID NO: 103 or the CRISPR nuclease/gRNA pair of SEQ ID NO:10/SEQ ID NO: 126; the CRISPR nuclease/gRNA pair of SEQ ID NO: 11/SEQ ID NO: 104 or the CRISPR nuclease/gRNA pair of SEQ ID NO: 11/SEQ ID NO: 127; the CRISPR nuclease/gRNA pair of SEQ ID NO: 12/SEQ ID NO: 105 or the CRISPR nuclease/gRNA pair of SEQ ID NO:12/SEQ ID NO: 128; the CRISPR nuclease/gRNA pair of SEQ ID NO:13/SEQ ID NO: 106 or the CRISPR nuclease/gRNA pair of SEQ ID NO: 13/SEQ ID NO: 129; the CRISPR nuclease/gRNA pair of SEQ ID NO: 14/SEQ ID NO: 107 or the CRISPR nuclease/gRNA pair of SEQ ID NO: 14/SEQ ID NO: 130; the CRISPR nuclease/gRNA pair of SEQ ID NO: 15/SEQ ID NO: 108 or the CRISPR nuclease/gRNA pair of SEQ ID NO: 15/SEQ ID NO: 131; the CRISPR nuclease/gRNA pair of SEQ ID NO: 16/SEQ ID NO: 109 or the CRISPR nuclease/gRNA pair of SEQ ID NO: 16/SEQ ID NO: 132; the CRISPR nuclease/gRNA pair of SEQ ID NO: 17/SEQ ID NO: 110 or the CRISPR nuclease/gRNA pair of SEQ ID NO:17/SEQ ID NO: 133; the CRISPR nuclease/gRNA pair of SEQ ID NO: 18/SEQ ID NO: 111 or the CRISPR nuclease/gRNA pair of SEQ ID NO: 18/SEQ ID NO: 134; the CRISPR nuclease/gRNA pair of SEQ ID NO: 19/SEQ ID NO: 112 or the CRISPR nuclease/gRNA pair of SEQ ID NO:19/SEQ ID NO: 135; the CRISPR nuclease/gRNA pair of SEQ ID NO:20/SEQ ID NO: 113 or the CRISPR nuclease/gRNA pair of SEQ ID NO:20/SEQ ID NO: 136; the CRISPR nuclease/gRNA pair of SEQ ID NO:21/SEQ ID NO: 114 or the CRISPR nuclease/gRNA pair of SEQ ID NO:21/SEQ ID NO: 137; the CRISPR nuclease/gRNA pair of SEQ ID NO:22/SEQ ID NO: 115 or the CRISPR nuclease/gRNA pair of SEQ ID NO:22/SEQ ID NO: 138; the CRISPR nuclease/gRNA pair of SEQ ID NO:23/SEQ ID NO: 116 or the CRISPR nuclease/gRNA pair of SEQ ID NO:23/SEQ ID NO: 139; the CRISPR nuclease/gRNA pair of SEQ ID NO:24/SEQ ID NO: 140 or the CRISPR nuclease/gRNA pair of SEQ ID NO:24/SEQ ID NO: 164; the CRISPR nuclease/gRNA pair of SEQ ID NO:25/SEQ ID NO: 141 or the CRISPR nuclease/gRNA pair of SEQ ID NO:25/SEQ ID NO: 165; the CRISPR nuclease/gRNA pair of SEQ ID NO:26/SEQ ID NO: 142 or the CRISPR nuclease/gRNA pair of SEQ ID NO:26/SEQ ID NO: 166; the CRISPR nuclease/gRNA pair of SEQ ID NO:27/SEQ ID NO: 143 or the CRISPR nuclease/gRNA pair of SEQ ID NO:27/SEQ ID NO: 167; the CRISPR nuclease/gRNA pair of SEQ ID NO:28/SEQ ID NO: 144 or the CRISPR nuclease/gRNA pair of SEQ ID NO:28/SEQ ID NO: 168; the CRISPR nuclease/gRNA pair of SEQ ID NO:29/SEQ ID NO: 145 or the CRISPR nuclease/gRNA pair of SEQ ID NO:29/SEQ ID NO: 169; the CRISPR nuclease/gRNA pair of SEQ ID NO:30/SEQ ID NO: 146 or the CRISPR nuclease/gRNA pair of SEQ ID NO:30/SEQ ID NO: 170; the CRISPR nuclease/gRNA pair of SEQ ID NO:31/SEQ ID NO: 147 or the CRISPR nuclease/gRNA pair of SEQ ID NO:31/SEQ ID NO: 171; the CRISPR nuclease/gRNA pair of SEQ ID NO:32/SEQ ID NO: 148 or the CRISPR nuclease/gRNA pair of SEQ ID NO:32/SEQ ID NO: 172; the CRISPR nuclease/gRNA pair of SEQ ID NO:33/SEQ ID NO: 149 or the CRISPR nuclease/gRNA pair of SEQ ID NO:33/SEQ ID NO: 173; the CRISPR nuclease/gRNA pair of SEQ ID NO:34/SEQ ID NO: 150 or the CRISPR nuclease/gRNA pair of SEQ ID NO:34/SEQ ID NO: 174; the CRISPR nuclease/gRNA pair of SEQ ID NO:35/SEQ ID NO: 151 or the CRISPR nuclease/gRNA pair of SEQ ID NO:35/SEQ ID NO: 175; the CRISPR nuclease/gRNA pair of SEQ ID NO:36/SEQ ID NO: 152 or the CRISPR nuclease/gRNA pair of SEQ ID NO:36/SEQ ID NO: 176; the CRISPR nuclease/gRNA pair of SEQ ID NO:37/SEQ ID NO: 153 or the CRISPR nuclease/gRNA pair of SEQ ID NO:37/SEQ ID NO: 177; the CRISPR nuclease/gRNA pair of SEQ ID NO:38/SEQ ID NO: 154 or the CRISPR nuclease/gRNA pair of SEQ ID NO:38/SEQ ID NO: 178; the CRISPR nuclease/gRNA pair of SEQ ID NO:39/SEQ ID NO: 155 or the CRISPR nuclease/gRNA pair of SEQ ID NO:39/SEQ ID NO: 179; the CRISPR nuclease/gRNA pair of SEQ ID NO:40/SEQ ID NO: 156 or the CRISPR nuclease/gRNA pair of SEQ ID NO:40/SEQ ID NO: 180; the CRISPR nuclease/gRNA pair of SEQ ID NO:41/SEQ ID NO: 157 or the CRISPR nuclease/gRNA pair of SEQ ID NO:41/SEQ ID NO: 181; the CRISPR nuclease/gRNA pair of SEQ ID NO:42/SEQ ID NO: 158 or the CRISPR nuclease/gRNA pair of SEQ ID NO:42/SEQ ID NO: 182; the CRISPR nuclease/gRNA pair of SEQ ID NO:43/SEQ ID NO: 159 or the CRISPR nuclease/gRNA pair of SEQ ID NO:43/SEQ ID NO: 183; the CRISPR nuclease/gRNA pair of SEQ ID NO:44/SEQ ID NO: 160 or the CRISPR nuclease/gRNA pair of SEQ ID NO:44/SEQ ID NO: 184; the CRISPR nuclease/gRNA pair of SEQ ID NO:45/SEQ ID NO: 161 or the CRISPR nuclease/gRNA pair of SEQ ID NO:45/SEQ ID NO: 185; the CRISPR nuclease/gRNA pair of SEQ ID NO:46/SEQ ID NO: 162 or the CRISPR nuclease/gRNA pair of SEQ ID NO:46/SEQ ID NO: 186; the CRISPR nuclease/gRNA pair of SEQ ID NO:47/SEQ ID NO: 163 or the CRISPR nuclease/gRNA pair of SEQ ID NO:47/SEQ ID NO: 187; the CRISPR nuclease/gRNA pair of SEQ ID NO:48/SEQ ID NO: 188 or the CRISPR nuclease/gRNA pair of SEQ ID NO:48/SEQ ID NO: 234; the CRISPR nuclease/gRNA pair of SEQ ID NO:49/SEQ ID NO: 189 or the CRISPR nuclease/gRNA pair of SEQ ID NO:49/SEQ ID NO: 235; the CRISPR nuclease/gRNA pair of SEQ ID NO:50/SEQ ID NO: 190 or the CRISPR nuclease/gRNA pair of SEQ ID NO:50/SEQ ID NO: 236; the CRISPR nuclease/gRNA pair of SEQ ID NO:51/SEQ ID NO: 191 or the CRISPR nuclease/gRNA pair of SEQ ID NO:51/SEQ ID NO: 237; the CRISPR nuclease/gRNA pair of SEQ ID NO:52/SEQ ID NO: 192 or the CRISPR nuclease/gRNA pair of SEQ ID NO:52/SEQ ID NO: 238; the CRISPR nuclease/gRNA pair of SEQ ID NO:53/SEQ ID NO: 193 or the CRISPR nuclease/gRNA pair of SEQ ID NO:53/SEQ ID NO: 239; the CRISPR nuclease/gRNA pair of SEQ ID NO:54/SEQ ID NO: 194 or the CRISPR nuclease/gRNA pair of SEQ ID NO:54/SEQ ID NO: 240; the CRISPR nuclease/gRNA pair of SEQ ID NO:55/SEQ ID NO: 195 or the CRISPR nuclease/gRNA pair of SEQ ID NO:55/SEQ ID NO: 241; the CRISPR nuclease/gRNA pair of SEQ ID NO:56/SEQ ID NO: 196 or the CRISPR nuclease/gRNA pair of SEQ ID NO:56/SEQ ID NO: 242; the CRISPR nuclease/gRNA pair of SEQ ID NO:57/SEQ ID NO: 197 or the CRISPR nuclease/gRNA pair of SEQ ID NO:57/SEQ ID NO: 243; the CRISPR nuclease/gRNA pair of SEQ ID NO:58/SEQ ID NO: 198 or the CRISPR nuclease/gRNA pair of SEQ ID NO:58/SEQ ID NO: 244; the CRISPR nuclease/gRNA pair of SEQ ID NO:59/SEQ ID NO: 199 or the CRISPR nuclease/gRNA pair of SEQ ID NO:59/SEQ ID NO: 245; the CRISPR nuclease/gRNA pair of SEQ ID NO:60/SEQ ID NO: 200 or the CRISPR nuclease/gRNA pair of SEQ ID NO:60/SEQ ID NO: 246; the CRISPR nuclease/gRNA pair of SEQ ID NO:61/SEQ ID NO: 201 or the CRISPR nuclease/gRNA pair of SEQ ID NO:61/SEQ ID NO: 247; the CRISPR nuclease/gRNA pair of SEQ ID NO:62/SEQ ID NO: 202 or the CRISPR nuclease/gRNA pair of SEQ ID NO:62/SEQ ID NO: 248; the CRISPR nuclease/gRNA pair of SEQ ID NO:63/SEQ ID NO: 203 or the CRISPR nuclease/gRNA pair of SEQ ID NO:63/SEQ ID NO: 249; the CRISPR nuclease/gRNA pair of SEQ ID NO:64/SEQ ID NO: 204 or the CRISPR nuclease/gRNA pair of SEQ ID NO:64/SEQ ID NO: 250; the CRISPR nuclease/gRNA pair of SEQ ID NO:65/SEQ ID NO: 205 or the CRISPR nuclease/gRNA pair of SEQ ID NO:65/SEQ ID NO: 251; the CRISPR nuclease/gRNA pair of SEQ ID NO:66/SEQ ID NO: 206 or the CRISPR nuclease/gRNA pair of SEQ ID NO:66/SEQ ID NO: 252; the CRISPR nuclease/gRNA pair of SEQ ID NO:67/SEQ ID NO: 207 or the CRISPR nuclease/gRNA pair of SEQ ID NO:67/SEQ ID NO: 253; the CRISPR nuclease/gRNA pair of SEQ ID NO:68/SEQ ID NO: 208 or the CRISPR nuclease/gRNA pair of SEQ ID NO:68/SEQ ID NO: 254; the CRISPR nuclease/gRNA pair of SEQ ID NO:69/SEQ ID NO: 209 or the CRISPR nuclease/gRNA pair of SEQ ID NO:69/SEQ ID NO: 255; the CRISPR nuclease/gRNA pair of SEQ ID NO:70/SEQ ID NO: 210 or the CRISPR nuclease/gRNA pair of SEQ ID NO:70/SEQ ID NO: 256; the CRISPR nuclease/gRNA pair of SEQ ID NO:71/SEQ ID NO: 211 or the CRISPR nuclease/gRNA pair of SEQ ID NO:71/SEQ ID NO: 257; the CRISPR nuclease/gRNA pair of SEQ ID NO:72/SEQ ID NO: 212 or the CRISPR nuclease/gRNA pair of SEQ ID NO:72/SEQ ID NO: 258; the CRISPR nuclease/gRNA pair of SEQ ID NO:73/SEQ ID NO: 213 or the CRISPR nuclease/gRNA pair of SEQ ID NO:73/SEQ ID NO: 259; the CRISPR nuclease/gRNA pair of SEQ ID NO:74/SEQ ID NO: 214 or the CRISPR nuclease/gRNA pair of SEQ ID NO:74/SEQ ID NO: 260; the CRISPR nuclease/gRNA pair of SEQ ID NO:75/SEQ ID NO: 215 or the CRISPR nuclease/gRNA pair of SEQ ID NO:75/SEQ ID NO: 261; the CRISPR nuclease/gRNA pair of SEQ ID NO:76/SEQ ID NO: 216 or the CRISPR nuclease/gRNA pair of SEQ ID NO:76/SEQ ID NO: 262; the CRISPR nuclease/gRNA pair of SEQ ID NO:77/SEQ ID NO: 217 or the CRISPR nuclease/gRNA pair of SEQ ID NO:77/SEQ ID NO: 263; the CRISPR nuclease/gRNA pair of SEQ ID NO:78/SEQ ID NO: 218 or the CRISPR nuclease/gRNA pair of SEQ ID NO:78/SEQ ID NO: 264; the CRISPR nuclease/gRNA pair of SEQ ID NO:79/SEQ ID NO: 219 or the CRISPR nuclease/gRNA pair of SEQ ID NO:79/SEQ ID NO: 265; the CRISPR nuclease/gRNA pair of SEQ ID NO:80/SEQ ID NO: 220 or the CRISPR nuclease/gRNA pair of SEQ ID NO:80/SEQ ID NO: 266; the CRISPR nuclease/gRNA pair of SEQ ID NO:81/SEQ ID NO: 221 or the CRISPR nuclease/gRNA pair of SEQ ID NO:81/SEQ ID NO: 267; the CRISPR nuclease/gRNA pair of SEQ ID NO:82/SEQ ID NO: 222 or the CRISPR nuclease/gRNA pair of SEQ ID NO:82/SEQ ID NO: 268; the CRISPR nuclease/gRNA pair of SEQ ID NO:83/SEQ ID NO: 223 or the CRISPR nuclease/gRNA pair of SEQ ID NO:83/SEQ ID NO: 269; the CRISPR nuclease/gRNA pair of SEQ ID NO:84/SEQ ID NO: 224 or the CRISPR nuclease/gRNA pair of SEQ ID NO:84/SEQ ID NO: 270; the CRISPR nuclease/gRNA pair of SEQ ID NO:85/SEQ ID NO: 225 or the CRISPR nuclease/gRNA pair of SEQ ID NO:85/SEQ ID NO: 271; the CRISPR nuclease/gRNA pair of SEQ ID NO:86/SEQ ID NO: 226 or the CRISPR nuclease/gRNA pair of SEQ ID NO:86/SEQ ID NO: 272; the CRISPR nuclease/gRNA pair of SEQ ID NO:87/SEQ ID NO: 227 or the CRISPR nuclease/gRNA pair of SEQ ID NO:87/SEQ ID NO: 273; the CRISPR nuclease/gRNA pair of SEQ ID NO:88/SEQ ID NO: 228 or the CRISPR nuclease/gRNA pair of SEQ ID NO:88/SEQ ID NO: 274; the CRISPR nuclease/gRNA pair of SEQ ID NO:89/SEQ ID NO: 229 or the CRISPR nuclease/gRNA pair of SEQ ID NO:89/SEQ ID NO: 275; the CRISPR nuclease/gRNA pair of SEQ ID NO:90/SEQ ID NO: 230 or the CRISPR nuclease/gRNA pair of SEQ ID NO:90/SEQ ID NO: 276; the CRISPR nuclease/gRNA pair of SEQ ID NO:91/SEQ ID NO: 231 or the CRISPR nuclease/gRNA pair of SEQ ID NO:91/SEQ ID NO: 277; the CRISPR nuclease/gRNA pair of SEQ ID NO:92/SEQ ID NO: 232 or the CRISPR nuclease/gRNA pair of SEQ ID NO:92/SEQ ID NO: 278; and/or the CRISPR nuclease/gRNA pair of SEQ ID NO:93/SEQ ID NO: 233 or the CRISPR nuclease/gRNA pair of SEQ ID NO:93/SEQ ID NO: 279. In specific instances, the CRISPR nuclease/gRNA pair is SEQ ID NO:22/SEQ ID NO: 115 or the CRISPR nuclease/gRNA pair of SEQ ID NO:22/SEQ ID NO: 138; the CRISPR nuclease/gRNA pair of SEQ ID NO:62/SEQ ID NO: 202 or the CRISPR nuclease/gRNA pair of SEQ ID NO:62/SEQ ID NO: 248; the CRISPR nuclease/gRNA pair of SEQ ID NO:80/SEQ ID NO: 220 or the CRISPR nuclease/gRNA pair of SEQ ID NO:80/SEQ ID NO: 266; and/or the CRISPR nuclease/gRNA pair of SEQ ID NO:91/SEQ ID NO: 231 or the CRISPR nuclease/gRNA pair of SEQ ID NO:91/SEQ ID NO: 277. In preferred cases, the nucleic acid-guided CRISPR nuclease has trans-cleavage activity. In certain, cases the nucleic acid-guided CRISPR nuclease can hybridize to a PAM region in a target nucleic acid sequence. In some instances, the substrate for the nucleic acid-guided CRISPR nuclease is a ribonucleic acid molecule (RNA) complexed with a fluorophore and a quencher for the fluorophore. In other cases the substrate is a ribonucleic acid molecule (RNA) complexed with biotin. In yet other instances, the substrate can be a deoxyribonucleic acid (DNA) complexed with a detection moiety. The substrate can be present in the reaction mixtures in a range of concentrations ranging, e.g., from 250 nM to 450 nM.

[0008] In some instances, the reaction mixture(s) and/or enzyme systems described herein comprise pairs, each comprising a complex of a certain CRISPR nuclease and a gRNA, wherein the gRNA comprises a sequence (e.g., a gRNA sequence), and wherein the gRNA sequence comprises a direct repeat sequence. In some CRISPR nuclease/gRNA complex embodiments, the homology of the CRISPR nuclease (e.g., enzyme) may be at least 85%, at least 90%, at least 95%, or at least 99% amino acid homology to any one of SEQ ID NOs:1-93. In some CRISPR nuclease/gRNA complex embodiments, the gRNA sequence may comprise a direct repeat sequence having at least 85%, at least 90%, at least 95%, or at least 99% amino acid homology to any one of SEQ ID NOs:374-466. In some CRISPR nuclease/gRNA complex embodiments, each of the CRISPR nuclease and the direct repeat sequence of the gRNA may independently have at least 85%, at least 90%, at least 95%, or at least 99% homology to the sequences of a CRISPR nuclease/direct repeat pair selected from the group consisting of: the CRISPR nuclease/direct repeat pair of SEQ ID NO:1/SEQ ID NO:374; the CRISPR nuclease/direct repeat pair of SEQ ID NO:2/SEQ ID NO: 375; the CRISPR nuclease/direct repeat pair of SEQ ID NO:3/SEQ ID NO: 376; the CRISPR nuclease/direct repeat pair of SEQ ID NO:4/SEQ ID NO:377; the CRISPR nuclease/direct repeat pair of SEQ ID NO:5/SEQ ID NO:378; the CRISPR nuclease/direct repeat pair of SEQ ID NO:6/SEQ ID NO:379; the CRISPR nuclease/direct repeat pair of SEQ ID NO:7/SEQ ID NO:380; the CRISPR nuclease/direct repeat pair of SEQ ID NO:8/SEQ ID NO:381; the CRISPR nuclease/direct repeat pair of SEQ ID NO:9/SEQ ID NO:382; the CRISPR nuclease/direct repeat pair of SEQ ID NO: 10/SEQ ID NO:383; the CRISPR nuclease/direct repeat pair of SEQ ID NO: 11/SEQ ID NO:384; the CRISPR nuclease/direct repeat pair of SEQ ID NO:12/SEQ ID NO:385; the CRISPR nuclease/direct repeat pair of SEQ ID NO:13/SEQ ID NO:386; the CRISPR nuclease/direct repeat pair of SEQ ID NO:14/SEQ ID NO:387; the CRISPR nuclease/direct repeat pair of SEQ ID NO: 15/SEQ ID NO:388; the CRISPR nuclease/direct repeat pair of SEQ ID NO:16/SEQ ID NO:389; the CRISPR nuclease/direct repeat pair of SEQ ID NO:17/SEQ ID NO:390; the CRISPR nuclease/direct repeat pair of SEQ ID NO:18/SEQ ID NO:391; the CRISPR nuclease/direct repeat pair of SEQ ID NO: 19/SEQ ID NO:392; the CRISPR nuclease/direct repeat pair of SEQ ID NO:20/SEQ ID NO:393; the CRISPR nuclease/direct repeat pair of SEQ ID NO:21/SEQ ID NO:394; the CRISPR nuclease/direct repeat pair of SEQ ID NO:22/SEQ ID NO:395; the CRISPR nuclease/direct repeat pair of SEQ ID NO:23/SEQ ID NO:396; the CRISPR nuclease/direct repeat pair of SEQ ID NO:24/SEQ ID NO:397; the CRISPR nuclease/direct repeat pair of SEQ ID NO:25/SEQ ID NO:398; the CRISPR nuclease/direct repeat pair of SEQ ID NO:26/SEQ ID NO:399; the CRISPR nuclease/direct repeat pair of SEQ ID NO:27/SEQ ID NO:400; the CRISPR nuclease/direct repeat pair of SEQ ID NO:28/SEQ ID NO:401; the CRISPR nuclease/direct repeat pair of SEQ ID NO:29/SEQ ID NO:402; the CRISPR nuclease/direct repeat pair of SEQ ID NO:30/SEQ ID NO:403; the CRISPR nuclease/direct repeat pair of SEQ ID NO:31/SEQ ID NO:404; the CRISPR nuclease/direct repeat pair of SEQ ID NO:32/SEQ ID NO:405; the CRISPR nuclease/direct repeat pair of SEQ ID NO:33/SEQ ID NO:406; the CRISPR nuclease/direct repeat pair of SEQ ID NO:34/SEQ ID NO:407; the CRISPR nuclease/direct repeat pair of SEQ ID NO:35/SEQ ID NO:408; the CRISPR nuclease/direct repeat pair of SEQ ID NO:36/SEQ ID NO:409; the CRISPR nuclease/direct repeat pair of SEQ ID NO:37/SEQ ID NO:410; the CRISPR nuclease/direct repeat pair of SEQ ID NO:38/SEQ ID NO:411; the CRISPR nuclease/direct repeat pair of SEQ ID NO:39/SEQ ID NO:412; the CRISPR nuclease/direct repeat pair of SEQ ID NO:40/SEQ ID NO:413; the CRISPR nuclease/direct repeat pair of SEQ ID NO:41/SEQ ID NO:414; the CRISPR nuclease/direct repeat pair of SEQ ID NO:42/SEQ ID NO:415; the CRISPR nuclease/direct repeat pair of SEQ ID NO:43/SEQ ID NO:416; the CRISPR nuclease/direct repeat pair of SEQ ID NO:44/SEQ ID NO:417; the CRISPR nuclease/direct repeat pair of SEQ ID NO:45/SEQ ID NO:418; the CRISPR nuclease/direct repeat pair of SEQ ID NO:46/SEQ ID NO:419; the CRISPR nuclease/direct repeat pair of SEQ ID NO:47/SEQ ID NO:420; the CRISPR nuclease/direct repeat pair of SEQ ID NO:48/SEQ ID NO:421; the CRISPR nuclease/direct repeat pair of SEQ ID NO:49/SEQ ID NO:422; the CRISPR nuclease/direct repeat pair of SEQ ID NO:50/SEQ ID NO:423; the CRISPR nuclease/direct repeat pair of SEQ ID NO:51/SEQ ID NO:424; the CRISPR nuclease/direct repeat pair of SEQ ID NO:52/SEQ ID NO:425; the CRISPR nuclease/direct repeat pair of SEQ ID NO:53/SEQ ID NO:426; the CRISPR nuclease/direct repeat pair of SEQ ID NO:54/SEQ ID NO:427; the CRISPR nuclease/direct repeat pair of SEQ ID NO:55/SEQ ID NO:428; the CRISPR nuclease/direct repeat pair of SEQ ID NO:56/SEQ ID NO:429; the CRISPR nuclease/direct repeat pair of SEQ ID NO:57/SEQ ID NO:430; the CRISPR nuclease/direct repeat pair of SEQ ID NO:58/SEQ ID NO:431; the CRISPR nuclease/direct repeat pair of SEQ ID NO:59/SEQ ID NO:432; the CRISPR nuclease/direct repeat pair of SEQ ID NO:60/SEQ ID NO:433; the CRISPR nuclease/direct repeat pair of SEQ ID NO:61/SEQ ID NO:434; the CRISPR nuclease/direct repeat pair of SEQ ID NO:62/SEQ ID NO:435; the CRISPR nuclease/direct repeat pair of SEQ ID NO:63/SEQ ID NO:436; the CRISPR nuclease/direct repeat pair of SEQ ID NO:64/SEQ ID NO:437; the CRISPR nuclease/direct repeat pair of SEQ ID NO:65/SEQ ID NO:438; the CRISPR nuclease/direct repeat pair of SEQ ID NO:66/SEQ ID NO:439; the CRISPR nuclease/direct repeat pair of SEQ ID NO:67/SEQ ID NO:440; the CRISPR nuclease/direct repeat pair of SEQ ID NO:68/SEQ ID NO:441; the CRISPR nuclease/direct repeat pair of SEQ ID NO:69/SEQ ID NO:442; the CRISPR nuclease/direct repeat pair of SEQ ID NO:70/SEQ ID NO:443; the CRISPR nuclease/direct repeat pair of SEQ ID NO:71/SEQ ID NO:444; the CRISPR nuclease/direct repeat pair of SEQ ID NO:72/SEQ ID NO:445; the CRISPR nuclease/direct repeat pair of SEQ ID NO:73/SEQ ID NO:446; the CRISPR nuclease/direct repeat pair of SEQ ID NO:74/SEQ ID NO:447; the CRISPR nuclease/direct repeat pair of SEQ ID NO:75/SEQ ID NO:448; the CRISPR nuclease/direct repeat pair of SEQ ID NO:76/SEQ ID NO:449; the CRISPR nuclease/direct repeat pair of SEQ ID NO:77/SEQ ID NO:450; the CRISPR nuclease/direct repeat pair of SEQ ID NO:78/SEQ ID NO:451; the CRISPR nuclease/direct repeat pair of SEQ ID NO:79/SEQ ID NO:452; the CRISPR nuclease/direct repeat pair of SEQ ID NO:80/SEQ ID NO:453; the CRISPR nuclease/direct repeat pair of SEQ ID NO:81/SEQ ID NO:454; the CRISPR nuclease/direct repeat pair of SEQ ID NO:82/SEQ ID NO:455; the CRISPR nuclease/direct repeat pair of SEQ ID NO:83/SEQ ID NO:456; the CRISPR nuclease/direct repeat pair of SEQ ID NO:84/SEQ ID NO:457; the CRISPR nuclease/direct repeat pair of SEQ ID NO:85/SEQ ID NO:458; the CRISPR nuclease/direct repeat pair of SEQ ID NO:86/SEQ ID NO:459; the CRISPR nuclease/direct repeat pair of SEQ ID NO:87/SEQ ID NO:460; the CRISPR nuclease/direct repeat pair of SEQ ID NO:88/SEQ ID NO:461; the CRISPR nuclease/direct repeat pair of SEQ ID NO:89/SEQ ID NO:462; the CRISPR nuclease/direct repeat pair of SEQ ID NO:90/SEQ ID NO:463; the CRISPR nuclease/direct repeat pair of SEQ ID NO:91/SEQ ID NO:464; the CRISPR nuclease/direct repeat pair of SEQ ID NO:92/SEQ ID NO:465; or the CRISPR nuclease/direct repeat pair of SEQ ID NO:93/SEQ ID NO:466. Any of the reaction mixtures, expression vectors, enzyme systems, methods may comprise, encode, and/or use any one or more of the CRISPR nuclease/gRNA complexes described herein, including in the foregoing.

[0009] In some instances the reaction mixture(s) or enzymatic systems may further comprises a target nucleic acid sequence, e.g., a sequence from an influenza A virus (e.g., SEQ ID NO:373), an influenza B virus, a Respiratory Syncytial Virus (RSV), or a SARS-CoV-2 virus. In some instances, the target nucleic acid sequence activates cleavage of the substrate by the nucleic acid-guided CRISPR nuclease. Cleavage can occur, e.g., with a sensitivity of at least 25 nM. A nucleic acid-guided CRISPR nuclease can be present in the reaction mix in a concentration ranging from 10 ng/uL to 100 ng/uL. A guide nucleic acid (gRNA) can be present in the reaction mix in a concentration ranging from 20 nM to 180 nM. Suitable gRNAs can be from 40 nucleotides to 60 nucleotides in length. The reaction mixture(s) described herein may further comprise an RNase inhibitor and MgCl₂. The reaction mixture(s) described herein may also comprise a crRNA.

[0010] In some instances the disclosure provides reagents for the manufacture of components of reaction mixture(s) and enzymatic mix(es) described herein. In some instances, one or more expression vector(s) encode a nucleic acid-guided CRISPR nuclease having at least 85% amino acid homology to any one of SEQ ID NOs:1-93 from a heterologous promoter. In some instances, one or more expression vector(s) encode a direct repeat that has the same, or substantially the same sequence to any one of SEQ ID NOs:374-466 from a heterologous promoter. The heterologous promoter can be, e.g., a T7 promoter. In certain configurations the expression vector further comprises a purification tag, e.g., a 6-his tag. In the cases where a purification tag is present, the purification tag can be present on an N-terminus of the nucleic acid-guided CRISPR nuclease, on a C-terminus of the nucleic acid-guided CRISPR nuclease, or in both termini. The purification tag can be cleavable. A recombinant nucleic acid-guided CRISPR nuclease can be produced, e.g., from a cell-free expression system from an expression vector. Alternatively, the recombinant nucleic acid-guided CRISPR nuclease can be produced in a bacterial expression system. In certain cases, the recombinant nucleic acid-guided CRISPR nuclease is combined with gRNA comprising a direct repeat sequence selected from group consisting of one or more of SEQ ID NO:374-466. In certain cases, the recombinant nucleic acid-guided CRISPR nuclease has trans-cleavage activity, it may cleave a single stranded deoxyribonucleic acid (DNA) molecule, a double stranded deoxyribonucleic acid (DNA) molecule, or a ribonucleic acid (RNA) molecule. In one particular instance, a recombinant nucleic acid-guided CRISPR nuclease, produced in a cell-free expression system, can exhibit at least 25% higher cleavage activity as compared to LwaCas13a when cleaving SEQ ID NO: 180. Recombinant nucleic acid-guided CRISPR nucleases described herein have predicted molecular weights of 90 kDa to 170 kDa when produced from cell-free expression systems.

[0011] In some aspects, the disclosure provides one or more nucleic acid sequence(s) having at least 80%, at least 85%, at least 90%, or at least 95% sequence identity to any one of SEQ ID NOs:280-372, wherein the nucleic acid sequence encodes a nucleic acid-guided CRISPR nuclease comprising an amino acid sequence of any one of SEQ ID NOs:1-93 and a heterologous sequence, e.g., a heterologous promoter sequence or a heterologous sequence encoding a purification tag. The nucleic acid sequence can be recombinantly expressed in an organism or it can be produced in a cell-free expression system. In certain embodiments, the nucleic acid sequence is codon optimized for expression in E. coli.

[0012] In some aspects the disclosure provides a method of detecting a target nucleic acid, the method comprising: contacting a sample with a nucleic acid-guided nuclease system comprising: a nucleic acid-guided CRISPR nuclease having at least 90% identity to SEQ ID NO: 1-93, or a nucleic acid molecule encoding the nucleic acid-guided CRISPR nuclease; a guide nucleic acid for complexing with the nucleic acid-guided CRISPR nuclease, or a nucleic acid molecule encoding the guide nucleic acid; and allowing the target nucleic acid to activate the nucleic acid-guided CRISPR nuclease system to cleave a detectable substrate. In some aspects, the guide nucleic acid comprises SEQ ID NO. 115 or SEQ ID No. 138 when designed for targeting FluA. The disclosure contemplates other guide nucleic acid sequences comprising a direct repeat selected from any one of SEQ ID NO:374 to SEQ ID NO:466 and a spacer sequence designed for hybridizing with a pre-selected targeting region.

### BRIEF DESCRIPTION OF THE DRAWINGS

[0013] The foregoing and other features and advantages of the present invention will be more fully understood from the following detailed description of illustrative embodiments taken in conjunction with the accompanying drawings in which:

[0014] FIG. 1 (FIG. 1A) illustrates a rapid and high throughput workflow for the discovery of novel CRISPR-Cas proteins.

[0015] FIG. 1 (FIG. 1B) illustrates representative steps of the method employed to identify novel enzymes from sequences that do not share significant homology to existing enzymes.

[0016] FIG. 2 (FIG. 2) is a chart illustrating the results of an activity screening of initial 23 candidates with NTC (negative control). Activity was measured by the fluorescence released upon digestion of RNase Alert RNA substrate in the system.

[0017] FIG. 3 (FIG. 3) is a chart illustrating the results of activity confirmation of candidate JW13124 (SEQ ID NO: 22). JW13124 demonstrated a superior activity profile compared to the wild-type LwaCas13a under current testing conditions. Activity was measured by the fluorescence released upon digestion of an RNase Alert RNA substrate in the system.

[0018] FIG. 4 (FIG. 4) is a chart illustrating that collateral (i.e., trans-cleavage) activity of JW13124 (SEQ ID NO: 22) was only activated in the presence of both its corresponding guide RNA and the target sequence. Activity was measure by the fluorescence released upon digestion of RNase Alert RNA substrate in the system.

[0019] FIG. 5 (FIG. 5) is a chart illustrating the results of activity confirmation of candidate JW13166 (SEQ ID NO:62). JW13166 demonstrated a superior activity profile compared to the wild-type LwaCas13a under current testing conditions. Activity was measured by the fluorescence released upon digestion of an RNase Alert RNA substrate in the system.

[0020] FIG. 6 (FIG. 6) is a chart illustrating that collateral (i.e., trans-cleavage) activity of JW13166 (SEQ ID NO:62) was only activated in the presence of both its corresponding guide RNA and the target sequence. Activity was measure by the fluorescence released upon digestion of RNase Alert RNA substrate in the system.

[0021] FIG. 7 (FIG. 7) is a chart illustrating the results of activity confirmation of candidate JW13184 (SEQ ID NO:80). Activity was measured by the fluorescence released upon digestion of an RNase Alert RNA substrate in the system.

[0022] FIG. 8 (FIG. 8) is a chart illustrating collateral (i.e., trans-cleavage) activity of JW13184 (SEQ ID NO:80) in the presence of both its corresponding guide RNA and the target sequence. Activity was measure by the fluorescence released upon digestion of RNase Alert RNA substrate in the system.

[0023] FIG. 9 (FIG. 9) is a chart illustrating the results of activity confirmation of candidate JW13195 (SEQ ID NO:91). JW13195 demonstrated a superior activity profile compared to the wild-type LwaCas13a under current testing conditions. Activity was measured by the fluorescence released upon digestion of an RNase Alert RNA substrate in the system.

[0024] FIG. 10 (FIG. 10) is a chart illustrating that collateral (i.e., trans-cleavage) activity of JW13195 (SEQ ID NO:91) was only activated in the presence of both its corresponding guide RNA and the target sequence. Activity was measure by the fluorescence released upon digestion of RNase Alert RNA substrate in the system.

[0025] FIG. 11a (FIG. 11a) illustrate images of lateral flow strips used to detect RNA cleavage activity of nucleic acid-guided CRISPR nucleases and demonstrating that JW13166 (SEQ ID NO:62) produces measurable target RNA cleavage activity after an incubation time of 2 minutes at both 25° C. and 37° C. whereas wild-type LwaCas13a does not produce measurable target RNA cleavage activity after 2 minutes at either incubation time.

[0026] FIG. 11b (FIG. 11b) illustrate images of lateral flow strips used to detect RNA cleavage activity of nucleic acid-guided CRISPR nucleases and demonstrating that JW13166 (SEQ ID NO:62) produces measurable target RNA cleavage activity after an incubation time of 60 minutes at both 25° C. and 37° C. whereas wild-type LwaCas13a only produces measurable target RNA cleavage activity at an incubation temperature of 37° C.

[0027] It should be understood that the drawings are not necessarily to scale, and that like reference numbers refer to like features.

### INCORPORATION BY REFERENCE

[0028] All publications, patents, and patent applications mentioned in this specification are herein incorporated by reference to the same extent as if each individual publication, patent, or patent application was specifically and individually indicated to be incorporated by reference.

### Terminology

[0029] As used herein the abbreviation “CRISPR” generally refers to Clustered Regularly Interspaced Short Palindromic Repeats. Although there are diverse CRISPR-Cas systems among the different species of archaea and bacteria, these systems are generally connected by their dependence on a single-stranded RNA molecule (crRNA), which guides CRISPR proteins to recognize and cleave nucleic acid targets. The crRNA can be programmed towards a specific DNA or RNA region of interest through hybridization to a complementary sequence, which in some systems is restricted to the proximity of a protospacer adjacent motif (PAM) or protospacer flanking sequence. The term “CRISPR nuclease” refers to members of the CRISPR-Cas system. As used herein the term “CRISPR complex” or “complex” refers to a CRISPR nuclease complexed with a guide nucleic acid (gRNA).

[0030] As used herein, the term, “gRNA” refers to a ribonucleic acid sequence with a conserved sequence forming one or more stem-loop structure(s) (e.g., a direct repeat or “DR”) and a spacer sequence. Generally, the CRISPR nuclease binds to the DR in the “CRISPR complex” or “complex”, and the spacer sequence comprises a sequence that is complementary to the target nucleic acid.

[0031] As used herein the term, “CRISPR nuclease/gRNA pair”, refers to a complex comprising at a CRISPR nuclease and gRNA designed for complexing with the nuclease.

[0032] As used herein the term, “the CRISPR nuclease/direct repeat pair”, refers to a complex comprising at a CRISPR nuclease and gRNA comprising at least one direct repeat sequence for complexing with the CRISPR nuclease. It is to be understood that the gRNA may comprise other regions for its functionality, including a “spacer” region.

[0033] As used herein the abbreviation “RSV” generally refers to Respiratory Syncytial Virus (RSV).

[0034] As used herein the abbreviations “FluA” and “FluB” generally refer to Influenza A and Influenza B, the two main types of influenza viruses that cause seasonal flu outbreaks. As used herein the term “Flu” refers to all viruses in the Influenza family.

[0035] As used herein the abbreviations “SARS-CoV-2” refers to the virus causing COVID-19.

[0036] As used herein, certain terms may have the following defined meanings. As used in the specification and claims, the singular form “a,” “an” and “the” include singular and plural references unless the context clearly dictates otherwise. For example, the term “a nucleic acid” includes a single nucleic acid molecule as well as a plurality of nucleic acids, including mixtures thereof.

[0037] As used herein, “about” means the recited quantity exactly and small variations within a limited range encompassing plus or minus 10% of the recited quantity. In other words, the limited range encompassed can include ±10%, 9%, 8%, 7%, ±6%, 5, 4%, 3%, 2%, 1%, 0.5%, 0.2%, ±0.1%, +0.05%, or smaller, as well as the recited value itself. Thus, by way of example, “about 10” should be understood to mean “10” and a range no larger than “9-11”.

[0038] As used herein, the term “comprising” is intended to mean that the compositions and methods include the recited elements, but not excluding others. “Consisting essentially of” when used to define compositions and methods, shall mean excluding other elements of any essential significance to the composition or method. “Consisting of” shall mean excluding more than trace elements of other ingredients for claimed compositions and substantial method steps. Examples and implementations defined by each of these transition terms are within the scope of this disclosure. Accordingly, it is intended that the methods and compositions can include additional steps and components (comprising) or alternatively including steps and compositions of no significance (consisting essentially of) or alternatively, intending only the stated method steps or compositions (consisting of).

[0039] As used herein, the term “percent sequence identity” with respect to a reference nucleic acid sequence is the percentage of nucleic acid bases in a target sequence that are identical with the nucleic acid bases in the reference sequence, respectively, after aligning the sequences and introducing gaps, if necessary, to achieve the maximum percent sequence identity. Methods of sequence alignment are well known in the art. Optimal alignment of sequences can be conducted by methods described in Needleman and Wunsch, 1970, J. Mol. Biol. 48:443; Pearson and Lipman, 1988, PNAS 85:2444, by computerized implementations of these algorithms. Alignments can be made using publicly available computer software such as BLASTp, BLASTn, BLAST-2, ALIGN or MegAlign Pro (DNASTAR) software.

[0040] As used herein the term “sample”, generally refers to any source of nucleic acids—either from an specimen, from a subject “hosting” the specimen or both—that can be informative of an environment. It may refer to samples derived from a subject, such as a nasal swab, blood, plasma, urine, tissue, faces, bone marrow, saliva, cerebrospinal fluid, or any other suitable tissue sample. It may refer to swab samples that are collected from surfaces in food processing facilities, long-term care facilities, hospitals, restaurants, or any suitable surface comprising nucleic acids. It may refer to a sample that comprises a biological tissue, soil, water, air, air filter materials, animal production, feed, manure, crop production, manufacturing plants, or any other suitable samples. Such samples may be derived from a hospital or a clinic and they may be analyzed on a mobile platform.

[0041] As used herein, the term “subject,” can refer to a human or to another animal. An animal can be a mouse, a rat, a guinea pig, a dog, a cat, a horse, a rabbit, and various other animals. A subject can be of any age, for example, a subject can be an infant, a toddler, a child, a pre-adolescent, an adolescent, an adult, or an elderly individual.

### DETAILED DESCRIPTIONS

[0042] In the following description, numerous specific details are set forth to provide a more thorough understanding of the present invention. However, it will be apparent to one of skill in the art that the present invention may be practiced without one or more of these specific details. In other instances, features and procedures well known to those skilled in the art have not been described in order to avoid obscuring the invention. The terms used herein are intended to have the plain and ordinary meaning as understood by those of ordinary skill in the art.

[0043] Described herein are reaction mixtures, enzyme systems, fluidic devices, kits, and methods for detection of target nucleic acids associated with various diseases. The reaction mixtures, enzyme systems, fluidic devices, kits, and methods described herein may comprise reagents of a guide nucleic acid targeting a target nucleic acid, a nucleic acid-guided CRISPR nuclease (i.e., a CRISPR nuclease), and a single stranded detector nucleic acid with a detection moiety. The target nucleic acid may be cleaved by a complex that is defined by a nucleic acid-guided CRISPR nuclease (CRISPR nuclease) complexed with a guide nucleic acid (gRNA), i.e., a nucleic acid-guided CRISPR nuclease/gRNA pair. The gRNA in the complex typically comprises a direct repeat sequence for interacting with the CRISPR enzyme, and a spacer sequence. The disclosure contemplates various CRISPR complexes, including, e.g., complexes targeting FluA, FluB, RSV, and Sars-CoV-2. Illustrative examples are provided throughout targeting FluA.

[0044] The disclosure describes the development of a rapid and high throughput workflow for the discovery of novel CRISPR-Cas proteins (FIG. 1). Preliminary candidates were mined and evaluated from public database (e.g. GenBank, SGB, MGnify, etc.), and a representative subsets of the candidates (93 candidates) were designed into Cell-Free Protein Synthesis (CFPS) compatible expression templates for downstream protein expression. A fluorescence-based high-throughput activity assay was then used to differentiate potential active candidate(s) from negative control samples. During initial screening rounds with a preliminary number of candidate CRISPR nuclease/gRNA complexes, four candidates, were identified to be active in the conditions tested when complexed with the tested gRNA (FIG. 2, FIG. 3, FIG. 5, FIG. 7, and FIG. 9). Surprisingly, when compared to a wild-type positive control CRISPR-Cas protein, LwaCas13a, candidates JW13124 (SEQ ID NO: 22), JW13166 (SEQ ID NO: 62), and JW13195 (SEQ ID NO: 91) were able to demonstrate a superior activity profile (FIGS. 3, FIG. 5, FIG. 7, and FIG. 9). Additionally, candidates JW13124 (SEQ ID NO: 22), JW13166 (SEQ ID NO: 62), and JW13195 (SEQ ID NO: 91) were only activated in the presence of both its corresponding guide RNA and its intended target sequence (FIG. 4, FIG. 6, and FIG. 10). Candidate JW13184 (SEQ ID NO: 80) was also found to display activity, although a distinct activity profile (FIG. 8).

### CRISPR Enzymes

[0045] Since their initial discovery, the number of different CRISPR-Cas systems has expanded rapidly. Currently, CRISPR-Cas systems can be divided, according to evolutionary relationships, into two classes, six types and several subtype. The classes of CRISPR-Cas system are defined by the nature of the ribonucleoprotein effector complex: class 1 systems are characterized by a complex of multiple effector proteins, and class 2 systems encompass a single crRNA-binding protein. The main difference between CRISPR type II (Cas9) systems and type V (Cas12) and type VI (Cas13) systems is the ability of the latter two systems to trigger non-specific collateral cleavage (trans cleavage or trans-cleavage) upon target hybridization. Collateral activity involves the cleavage of non-targeted single-stranded DNA (ssDNA; Cas12) or single-stranded RNA (ssRNA; Cas13) in solution, which enables the sensing of nucleic acids through signal amplification and allows for various readouts through the addition of functionalized reporter nucleic acids, which are generally cleaved by collateral (trans cleavage) activity. The present disclosure relates to the discovery of novel CRISPR enzymes having a very low degree of amino acid sequence homology to any previously known CRISPR-Cas proteins (<42% amino acid sequence homology to any characterized CRISPR-Cas proteins with >65% coverage) and characterization of their function with putatively tested guide RNAs. In the discovery of the identified novel CRISPR enzymes the present disclosure employed a method that: 1) extracted putative CRISPR-Cas protein signatures (motifs and functional domains) from known enzymes; 2) surveyed public genomic and metagenomics databases with possible sequences that matches to the signature at various degrees; 3) provided de-redundancy of initial candidate pool by removing repeats and previously characterized CRISPR-Cas proteins; 4) ranked candidates by phylogenetic representations; and 5) performed activity assays of representative candidates with rapid and high-throughput cell-free protein synthesis technologies, thereby confirming activity of certain candidates. Further preliminary characterization of lead candidates was also performed to confirm activity.

[0046] Disclosed herein are nucleic acid-guided nucleases, in particular CRISPR nucleases with SEQ ID Nos:1-93. In some aspects, the nucleases described herein were discovered from an evaluation of sequences that displayed <42% amino acid sequence homology to representative (e.g., Cas9, Cas12, Cas13), CRISPR-Cas systems in a high throughput sequence screen from databases including GenBank, SGB, and MGnify. The high throughput screen also identified 93 putative direct repeat sequences that have been tested for forming active complexes with their respective enzymes. Also disclosed herein are putative direct repeat sequences that have been discovered in the evaluation of the enzymes above. The direct repeat sequences of SEQ ID NOs:374-466 were identified as sequences that could potentially form complexes with the enzymes of SEQ ID Nos: 1-93.

[0047] Suitable nucleic acid-guided nucleases can be from an organism from a genus which includes but is not limited to Thiomicrospira, Succinivibrio, Candidatus, Porphyromonas, Acidaminococcus, Acidomonococcus, Prevotella, Smithella, Moraxella, Synergistes, Francisella, Leptospira, Catenibacterium, Kandleria, Clostridium, Dorea, Coprococcus, Enterococcus, Fructobacillus, Weissella, Pediococcus, Corynebacter, Sutterella, Legionella, Treponema, Roseburia, Filifactor, Eubacterium, Streptococcus, Lactobacillus, Mycoplasma, Bacteroides, Flaviivola, Flavobacterium, Sphaerochaeta, Azospirillum, Gluconacetobacter, Neisseria, Roseburia, Parvibaculum, Staphylococcus, Nitratifractor, Mycoplasma, Alicyclobacillus, Brevibacilus, Bacillus, Bacteroidetes, Brevibacilus, Carnobacterium, Clostridiaridium, Clostridium, Desulfonatronum, Desulfovibrio, Helcococcus, Leptotrichia, Listeria, Methanomethyophilus, Methylobacterium, Opitutaceae, Paludibacter, Rhodobacter, Sphaerochaeta, Tuberibacillus, Oleiphilus, Omnitrophica, Parcubacteria, and Campylobacter. Species of organism of such a genus can be as otherwise herein discussed. Suitable nucleic acid-guided nucleases can be from an organism from a genus or unclassified genus within a kingdom which includes but is not limited to Firmicute, Actinobacteria, Bacteroidetes, Proteobacteria, Spirochates, and Tenericutes. Suitable nucleic acid-guided nucleases can be from an organism from a genus or unclassified genus within a phylum which includes but is not limited to Erysipelotrichia, Clostridia, Bacilli, Actinobacteria, Bacteroidetes, Flavobacteria, Alphaproteobacteria, Betaproteobacteria, Gammaproteobacteria, Deltaproteobacteria, Epsilonproteobacteria, Spirochaetes, and Mollicutes. Suitable nucleic acid-guided nucleases can be from an organism from a genus or unclassified genus within an order which includes but is not limited to Clostridiales, Lactobacillales, Actinomycetales, Bacteroidales, Flavobacteriales, Rhizobiales, Rhodospirillales, Burkholderiales, Neisseriales, Legionellales, Nautiliales, Campylobacterales, Spirochaetales, Mycoplasmatales, and Thiotrichales. Suitable nucleic acid-guided nucleases can be from an organism from a genus or unclassified genus within a family which includes but is not limited to Lachnospiraceae, Enterococcaceae, Leuconostocaceae, Lactobacillaceae, Streptococcaceae, Peptostreptococcaceae, Staphylococcaceae, Eubacteriaceae, Corynebacterineae, Bacteroidaceae, Flavobacterium, Cryomoorphaceae, Rhodobiaceae, Rhodospirillaceae, Acetobacteraceae, Sutterellaceae, Neisseriaceae, Legionellaceae, Nautiliaceae, Campylobacteraceae, Spirochaetaceae, Mycoplasmataceae, Pisciririckettsiaceae, and Francisellaceae.

[0048] In some instances, a nucleic acid-guided nuclease (CRISPR nuclease) disclosed herein comprises an amino acid sequence comprising at least 50% amino acid identity to any one of SEQ ID NO: 1-93. In some instances, a CRISPR nuclease comprises an amino acid sequence comprising at least about 10%, 20%, 30%, 40%, 50%, 60%, 65%, 70%, 75%, 80%, 85%, 90%, 95%, 99%, or 100% amino acid identity to any one of SEQ ID NO: 1-93. In some cases, the nucleic acid-guided nuclease is encoded by a sequence that comprises at least about 50%, 60%, 65%, 70%, 75%, 80%, 85%, 90%, 95%, 99% or greater nucleic acid sequence identity to any one of SEQ ID NO: 280-372. In some cases, the nucleic acid-guided nuclease comprises at least about 50%, 60%, 65%, 70%, 75%, 80%, 85%, 90%, 95%, greater than 95%, amino acid identity to SEQ ID NO: 22.

[0049] In some instances, a nucleic acid-guided nuclease disclosed herein is encoded on a nucleic acid sequence. Such a nucleic acid can be expressed in a cell-free expression system, e.g., FIG. 1. Alternatively, such a nucleic acid can be codon optimized for expression in a desired host cell. Suitable host cells can include, as non-limiting examples, prokaryotic cells such as E. coli, P. aeruginosa, B. subtilus, and V. natriegens, and eukaryotic cells such as S. cerevisiae, plant cells, insect cells, nematode cells, amphibian cells, fish cells, or mammalian cells, including human cells.

[0050] A nucleic acid sequence encoding a nucleic acid-guided nuclease can be operably linked to a promoter. Such nucleic acid sequences can be linear or circular. The nucleic acid sequences can be comprised on a larger linear or circular nucleic acid sequences that comprises additional elements such as an origin of replication, selectable or screenable marker, terminator, other components of a targetable nuclease system, such as a guide nucleic acid, or an editing or recorder cassette as disclosed herein. These larger nucleic acid sequences can be recombinant expression vectors.

### Guide Nucleic Acid (2RNA) and Complex(es)

[0051] A guide nucleic acid (gRNA) is typically a ribonucleic acid sequence with a conserved sequence forming one or more stem-loop structure(s) (e.g., a direct repeat or “DR”) and a spacer sequence. Non-limiting examples of direct repeats are provided in SEQ ID NOs: 374-466. Generally, the CRISPR nuclease binds to the DR in the “CRISPR complex” or “complex”, and the spacer sequence comprises a sequence that is complementary to the target nucleic acid. In some instances, complexing of the gRNA “triggers” a nuclease activity of the CRISPR/nuclease gRNA complex. In preferred instances, “triggering” of a nuclease activity of the CRISPR/nuclease gRNA complex also requires a presence of a target nucleic acid. A target nucleic acid is one that hybridizes to a direct repeat with sufficient homology to trigger nuclease activation (e.g., greater than 80%).

[0052] A guide nucleic acid can comprise one or more direct repeat sequences, which can form secondary and/or tertiary stem-loop structures. In general, a “direct repeat sequence” includes any sequence that has sufficient sequence to promote formation of a CRISPR complex, wherein the complex comprises a nucleic acid-guided nuclease and a guide nucleic acid. Sufficient structure within the direct repeat sequence to promote formation of a CRISPR complex may include a degree of complementarity along the length of two sequence regions within the scaffold sequence, such as one or two sequence regions involved in forming a secondary structure. In some aspects, the complexes of the disclosure were identified based on putative and/or iterative analysis for identifying potential enzyme sequences that had a likelihood of forming a complex with potential gRNAs. The present disclosure implemented a proximal cut-off for the relative distance between the CRISPR arrays, which contains the direct repeat sequence information that can be incorporated into a gRNA sequence, to that of the putative CRISPR sequence on genomic or assembled metagenomics sequence input to be considered a candidate fit for additional testing. As a result, the present disclosure identified predicted CRISPR array sequence information accompanying every single candidate from the candidate pool. In some cases, sub-categories were identified bases on CRISPR sequences known in the art (e.g. Cas13a or Cas13b). The present disclosure designed, based on this CRISPR array sequence proximity, two gRNAs for each candidate where the spacer sequence was either at the 3′-end or the 5′-end of the direct repeats sequence.

[0053] A guide nucleic acid can be compatible with a nucleic acid-guided nuclease when the two elements can form a functional CRISPR nuclease complex capable of cleaving a nucleic acid sequence specifically (i.e., targeted activity) and/or non-specifically (i.e., collateral activity). In some instances, a compatible scaffold sequence for a compatible guide nucleic acid can be found by scanning sequences adjacent to a native nucleic acid-guided nuclease loci. For example, native nucleic acid-guided nucleases can be encoded on a genome within proximity to a corresponding compatible direct repeat sequence. Alternatively, a gRNA sequence may be identified, e.g., based on an optimal alignment of a nucleic acid sequence for forming a secondary structure that could complex with a CRISPR nuclease. It may be determined by any suitable alignment algorithm, and may further account for secondary structures, such as self-complementarity within either the one or more sequence regions forming a secondary structure. In some embodiments, the degree of complementarity between the one or two sequence regions along the length of the shorter of the two when optimally aligned is about or more than about 25%, 30%, 40%, 50%, 60%, 70%, 80%, 90%, 95%, 97.5%, 99%, or higher. In some embodiments, at least one of the two sequence regions is about or more than about 5, 6, 7, 8, 9, 10, 11, 12, 13, 14, 15, 16, 17, 18, 19, 20, 25, 30, 40, 50, or more nucleotides in length.

[0054] A guide nucleic acid can comprise a spacer sequence. A spacer sequence is a polynucleotide sequence having sufficient complementarity with a target polynucleotide sequence to hybridize with the target sequence. The degree of complementarity between a spacer sequence and its corresponding target sequence, when optimally aligned using a suitable alignment algorithm, can be about or more than about 50%, 60%, 75%, 80%, 85%, 90%, 95%, 97.5%, 99%, or more. Optimal alignment may be determined with the use of any suitable algorithm for aligning sequences. In some embodiments, a spacer sequence is about or more than about 5, 10, 11, 12, 13, 14, 15, 16, 17, 18, 19, 20, 21, 22, 23, 24, 25, 26, 27, 28, 29, 30, 35, 40, 45, 50, 75, or more nucleotides in length. In some embodiments, a spacer sequence is less than about 75, 50, 45, 40, 35, 30, 25, 20 nucleotides in length. Preferably the spacer sequence is 10-40 nucleotides long. The spacer sequence can be 15-25 nucleotides in length. The spacer sequence can be ˜15 nucleotides in length. The spacer sequence can be 16 nucleotides in length. The spacer sequence can be 17 nucleotides in length. The spacer sequence can be 18 nucleotides in length. The spacer sequence can be 19 nucleotides in length. The spacer sequence can be 20 nucleotides in length. Non-limiting examples of putative spacer sequences considered by the invention include SEQ ID NOs:374-466. Certain exemplary gRNAs described herein are tested with specific spacer sequences (e.g., FLU A target), see SEQ ID NOs 94-279. It is to be understood however, that one of ordinary skill in the art, looking at certain tested gRNAs is readily able to identify the direct repeat sequence and distinguish it from the spacer sequence.

[0055] In some instances, a gRNA complexed with a compatible nucleic acid-guided nuclease can hybridize with a target sequence, thereby directing the nuclease to indiscriminately cleave all surrounding nucleic acid sequences, i.e., collateral activity. In these cases, the CRISPR nuclease can cleave not only the target sequence, but it may indiscriminately cleave its surrounding nucleic acids despite of their sequence. In other instances, a gRNA complexed with a compatible nucleic acid-guided nuclease can hybridize with a target sequence, thereby directing the nuclease to cleave target sequence, i.e., specific target activity. In certain cases, hybridization effectively “directs” sequence-specific binding of a complexed nucleic acid-guided nuclease to a target sequence. In these cases, the CRISPR nuclease may preferably cleave the target sequence.

[0056] A direct repeat sequence of a subject guide nucleic acid can comprise a secondary structure and/or a tertiary structure. In some cases, binding kinetics of a guide nucleic acid to a nucleic acid-guided nuclease is determined in part by secondary structures within the direct repeat sequence. In some cases, binding kinetics of a guide nucleic acid to a nucleic acid-guided nuclease is determined in part by nucleic acid sequence with the scaffold sequence. In CRISPR-based diagnostics, quantification through comparison with a standard curve can be achieved within the picomolar-to-micromolar range (10⁻¹² M-10⁻⁶ M), where CRISPR-based collateral-cleavage activity correlates with target concentration.

[0057] In some aspects, the invention provides a CRISPR nuclease that complexes with a guide nucleic acid comprising a direct repeat sequence. In certain cases, the disclosure contemplates certain complexes, including the CRISPR nuclease/direct repeat pair of SEQ ID NO:1/SEQ ID NO: 374 (JW13101); the CRISPR nuclease/direct repeat pair of SEQ ID NO:2/SEQ ID NO: 375 (JW13102); the CRISPR nuclease/direct repeat pair of SEQ ID NO:3/SEQ ID NO: 376 (JW13103); the CRISPR nuclease/direct repeat pair of SEQ ID NO:4/SEQ ID NO: 377 (JW13104); the CRISPR nuclease/direct repeat pair of SEQ ID NO:5/SEQ ID NO: 378 (JW13105); the CRISPR nuclease/direct repeat pair of SEQ ID NO:6/SEQ ID NO: 379 (JW13106); the CRISPR nuclease/direct repeat pair of SEQ ID NO:7/SEQ ID NO: 380 (JW13107); the CRISPR nuclease/direct repeat pair of SEQ ID NO:8/SEQ ID NO: 381 (JW13108); the CRISPR nuclease/direct repeat pair of SEQ ID NO:9/SEQ ID NO: 382 (JW13110); the CRISPR nuclease/direct repeat pair of SEQ ID NO: 10/SEQ ID NO: 383 (JW13112); the CRISPR nuclease/direct repeat pair of SEQ ID NO: 11/SEQ ID NO: 384 (JW13113); the CRISPR nuclease/direct repeat pair of SEQ ID NO: 12/SEQ ID NO: 385 (JW13114); the CRISPR nuclease/direct repeat pair of SEQ ID NO: 13/SEQ ID NO: 386 (JW13115); the CRISPR nuclease/direct repeat pair of SEQ ID NO: 14/SEQ ID NO: 387 (JW13116); the CRISPR nuclease/direct repeat pair of SEQ ID NO: 15/SEQ ID NO: 388 (JW13117); the CRISPR nuclease/direct repeat pair of SEQ ID NO: 16/SEQ ID NO: 389 (JW13118); the CRISPR nuclease/direct repeat pair of SEQ ID NO:17/SEQ ID NO: 390 (JW13119); the CRISPR nuclease/direct repeat pair of SEQ ID NO: 18/SEQ ID NO: 391 (JW13120); the CRISPR nuclease/direct repeat pair of SEQ ID NO: 19/SEQ ID NO: 392 (JW13121); the CRISPR nuclease/direct repeat pair of SEQ ID NO:20/SEQ ID NO: 393 (JW13122); the CRISPR nuclease/direct repeat pair of SEQ ID NO: 21/SEQ ID NO: 394 (JW13123); the CRISPR nuclease/direct repeat pair of SEQ ID NO:22/SEQ ID NO: 395 (JW13124); the CRISPR nuclease/direct repeat pair of SEQ ID NO:23/SEQ ID NO: 396 (JW13125); the CRISPR nuclease/direct repeat pair of SEQ ID NO:24/SEQ ID NO: 397 (JW13126); the CRISPR nuclease/direct repeat pair of SEQ ID NO:25/SEQ ID NO: 398 (JW13127); the CRISPR nuclease/direct repeat pair of SEQ ID NO:26/SEQ ID NO: 399 (JW13128); the CRISPR nuclease/direct repeat pair of SEQ ID NO:27/SEQ ID NO: 400 (JW13129); the CRISPR nuclease/direct repeat pair of SEQ ID NO:28/SEQ ID NO: 401 (JW13130); the CRISPR nuclease/direct repeat pair of SEQ ID NO:29/SEQ ID NO: 402 (JW13131); the CRISPR nuclease/direct repeat pair of SEQ ID NO:30/SEQ ID NO: 403 (JW13132); the CRISPR nuclease/direct repeat pair of SEQ ID NO:31/SEQ ID NO: 404 (JW13133); the CRISPR nuclease/direct repeat pair of SEQ ID NO:32/SEQ ID NO: 405 (JW13134); the CRISPR nuclease/direct repeat pair of SEQ ID NO:33/SEQ ID NO: 406 (JW13135); the CRISPR nuclease/direct repeat pair of SEQ ID NO:34/SEQ ID NO: 407 (JW13136); the CRISPR nuclease/direct repeat pair of SEQ ID NO:35/SEQ ID NO: 408 (JW13137); the CRISPR nuclease/direct repeat pair of SEQ ID NO:36/SEQ ID NO: 409 (JW13138); the CRISPR nuclease/direct repeat pair of SEQ ID NO:37/SEQ ID NO: 410 (JW13139); the CRISPR nuclease/direct repeat pair of SEQ ID NO:38/SEQ ID NO: 411 (JW13140); the CRISPR nuclease/direct repeat pair of SEQ ID NO:39/SEQ ID NO: 412 (JW13141); the CRISPR nuclease/direct repeat pair of SEQ ID NO:40/SEQ ID NO: 413 (JW13142); the CRISPR nuclease/direct repeat pair of SEQ ID NO:41/SEQ ID NO: 414 (JW13143); the CRISPR nuclease/direct repeat pair of SEQ ID NO:42/SEQ ID NO: 415 (JW13144); the CRISPR nuclease/direct repeat pair of SEQ ID NO:43/SEQ ID NO: 416 (JW13145); the CRISPR nuclease/direct repeat pair of SEQ ID NO:44/SEQ ID NO: 417 (JW13146); the CRISPR nuclease/direct repeat pair of SEQ ID NO:45/SEQ ID NO: 418 (JW13147); the CRISPR nuclease/direct repeat pair of SEQ ID NO:46/SEQ ID NO: 419 (JW13148); the CRISPR nuclease/direct repeat pair of SEQ ID NO:47/SEQ ID NO: 420 (JW13149); the CRISPR nuclease/direct repeat pair of SEQ ID NO:48/SEQ ID NO: 421 (JW13150); the CRISPR nuclease/direct repeat pair of SEQ ID NO:49/SEQ ID NO: 422 (JW13153); the CRISPR nuclease/direct repeat pair of SEQ ID NO:50/SEQ ID NO: 423 (JW13154); the CRISPR nuclease/direct repeat pair of SEQ ID NO:51/SEQ ID NO: 424 (JW13155); the CRISPR nuclease/direct repeat pair of SEQ ID NO:52/SEQ ID NO: 425 (JW13156); the CRISPR nuclease/direct repeat pair of SEQ ID NO:53/SEQ ID NO: 426 (JW13157); the CRISPR nuclease/direct repeat pair of SEQ ID NO:54/SEQ ID NO: 427 (JW13158); the CRISPR nuclease/direct repeat pair of SEQ ID NO:55/SEQ ID NO: 428 (JW13159); the CRISPR nuclease/direct repeat pair of SEQ ID NO:56/SEQ ID NO: 429 (JW13160); the CRISPR nuclease/direct repeat pair of SEQ ID NO:57/SEQ ID NO: 430 (JW13161); the CRISPR nuclease/direct repeat pair of SEQ ID NO:58/SEQ ID NO: 431 (JW13162); the CRISPR nuclease/direct repeat pair of SEQ ID NO:59/SEQ ID NO: 432 (JW13163); the CRISPR nuclease/direct repeat pair of SEQ ID NO:60/SEQ ID NO: 433 (JW13164); the CRISPR nuclease/direct repeat pair of SEQ ID NO:61/SEQ ID NO: 434 (JW13165); the CRISPR nuclease/direct repeat pair of SEQ ID NO:62/SEQ ID NO: 435 (JW13166); the CRISPR nuclease/direct repeat pair of SEQ ID NO:63/SEQ ID NO: 436 (JW13167); the CRISPR nuclease/direct repeat pair of SEQ ID NO:64/SEQ ID NO: 437 (JW13168); the CRISPR nuclease/direct repeat pair of SEQ ID NO:65/SEQ ID NO: 438 (JW13169); the CRISPR nuclease/direct repeat pair of SEQ ID NO:66/SEQ ID NO: 439 (JW13170); the CRISPR nuclease/direct repeat pair of SEQ ID NO:67/SEQ ID NO: 440 (JW13171); the CRISPR nuclease/direct repeat pair of SEQ ID NO:68/SEQ ID NO: 441 (JW13172); the CRISPR nuclease/direct repeat pair of SEQ ID NO: 69/SEQ ID NO: 442 (JW13173); the CRISPR nuclease/direct repeat pair of SEQ ID NO:70/SEQ ID NO: 443 (JW13174); the CRISPR nuclease/direct repeat pair of SEQ ID NO:71/SEQ ID NO: 444 (JW13175); the CRISPR nuclease/direct repeat pair of SEQ ID NO:72/SEQ ID NO: 445 (JW13176); the CRISPR nuclease/direct repeat pair of SEQ ID NO:73/SEQ ID NO: 446 (JW13177); the CRISPR nuclease/direct repeat pair of SEQ ID NO:74/SEQ ID NO: 447 (JW13178); the CRISPR nuclease/direct repeat pair of SEQ ID NO:75/SEQ ID NO: 448 (JW13179); the CRISPR nuclease/direct repeat pair of SEQ ID NO:76/SEQ ID NO: 449 (JW13180); the CRISPR nuclease/direct repeat pair of SEQ ID NO: 77/SEQ ID NO: 450 (JW13181); the CRISPR nuclease/direct repeat pair of SEQ ID NO:78/SEQ ID NO: 451 (JW13182); the CRISPR nuclease/direct repeat pair of SEQ ID NO:79/SEQ ID NO: 452 (JW13183); the CRISPR nuclease/direct repeat pair of SEQ ID NO:80/SEQ ID NO: 453 (JW13184); the CRISPR nuclease/direct repeat pair of SEQ ID NO:81/SEQ ID NO: 454 (JW13185); the CRISPR nuclease/direct repeat pair of SEQ ID NO:82/SEQ ID NO: 455 (JW13186); the CRISPR nuclease/direct repeat pair of SEQ ID NO:83/SEQ ID NO: 456 (JW13187); the CRISPR nuclease/direct repeat pair of SEQ ID NO:84/SEQ ID NO: 457 (JW13188); the CRISPR nuclease/direct repeat pair of SEQ ID NO:85/SEQ ID NO: 458 (JW13189); the CRISPR nuclease/direct repeat pair of SEQ ID NO:86/SEQ ID NO: 459 (JW13190); the CRISPR nuclease/direct repeat pair of SEQ ID NO:87/SEQ ID NO: 460 (JW13191); the CRISPR nuclease/direct repeat pair of SEQ ID NO:88/SEQ ID NO: 461 (JW13192); the CRISPR nuclease/direct repeat pair of SEQ ID NO:89/SEQ ID NO: 462 (JW13193); the CRISPR nuclease/direct repeat pair of SEQ ID NO:90/SEQ ID NO: 463 (JW13194); the CRISPR nuclease/direct repeat pair of SEQ ID NO:91/SEQ ID NO: 464 (JW13195); the CRISPR nuclease/direct repeat pair of SEQ ID NO:92/SEQ ID NO: 465 (JW13196); and/or the CRISPR nuclease/direct repeat pair of SEQ ID NO:93/SEQ ID NO: 466 (JW13197).

[0058] In some aspects, the invention provides a CRISPR nuclease that complexes with a guide nucleic acid comprising a direct repeat sequence and a spacer designed to hybridize (i.e., “target”) a specific target region of, e.g., a microorganism. In certain cases, the disclosure contemplates certain complexes, including the CRISPR nuclease/direct repeat pair of CRISPR nuclease/gRNA pair of SEQ ID NO:1/SEQ ID NO: 94 or the CRISPR nuclease/gRNA pair of SEQ ID NO:1/SEQ ID NO: 117 (JW13101); the CRISPR nuclease/gRNA pair of SEQ ID NO:2/SEQ ID NO: 95 or the CRISPR nuclease/gRNA pair of SEQ ID NO:2/SEQ ID NO: 118 (JW13102); the CRISPR nuclease/gRNA pair of SEQ ID NO:3/SEQ ID NO: 96 or the CRISPR nuclease/gRNA pair of SEQ ID NO:3/SEQ ID NO: 119 (JW13103); the CRISPR nuclease/gRNA pair of SEQ ID NO:4/SEQ ID NO: 97 or the CRISPR nuclease/gRNA pair of SEQ ID NO:4/SEQ ID NO: 120 (JW13104); the CRISPR nuclease/gRNA pair of SEQ ID NO:5/SEQ ID NO: 98 or the CRISPR nuclease/gRNA pair of SEQ ID NO:5/SEQ ID NO: 121 (JW13105); the CRISPR nuclease/gRNA pair of SEQ ID NO:6/SEQ ID NO: 99 or the CRISPR nuclease/gRNA pair of SEQ ID NO:6/SEQ ID NO: 122 (JW13106); the CRISPR nuclease/gRNA pair of SEQ ID NO:7/SEQ ID NO: 100 or the CRISPR nuclease/gRNA pair of SEQ ID NO:7/SEQ ID NO: 123 (JW13107); the CRISPR nuclease/gRNA pair of SEQ ID NO:8/SEQ ID NO: 101 or the CRISPR nuclease/gRNA pair of SEQ ID NO:8/SEQ ID NO: 124 (JW13108); the CRISPR nuclease/gRNA pair of SEQ ID NO:9/SEQ ID NO: 102 or the CRISPR nuclease/gRNA pair of SEQ ID NO:9/SEQ ID NO: 125 (JW13110); the CRISPR nuclease/gRNA pair of SEQ ID NO: 10/SEQ ID NO: 103 or the CRISPR nuclease/gRNA pair of SEQ ID NO: 10/SEQ ID NO: 126 (JW13112); the CRISPR nuclease/gRNA pair of SEQ ID NO:11/SEQ ID NO: 104 or the CRISPR nuclease/gRNA pair of SEQ ID NO: 11/SEQ ID NO: 127 (JW13113); the CRISPR nuclease/gRNA pair of SEQ ID NO:12/SEQ ID NO: 105 or the CRISPR nuclease/gRNA pair of SEQ ID NO:12/SEQ ID NO: 128 (JW13114); the CRISPR nuclease/gRNA pair of SEQ ID NO: 13/SEQ ID NO: 106 or the CRISPR nuclease/gRNA pair of SEQ ID NO: 13/SEQ ID NO: 129 (JW13115); the CRISPR nuclease/gRNA pair of SEQ ID NO: 14/SEQ ID NO: 107 or the CRISPR nuclease/gRNA pair of SEQ ID NO: 14/SEQ ID NO: 130 (JW13116); the CRISPR nuclease/gRNA pair of SEQ ID NO:15/SEQ ID NO: 108 or the CRISPR nuclease/gRNA pair of SEQ ID NO:15/SEQ ID NO: 131 (JW13117); the CRISPR nuclease/gRNA pair of SEQ ID NO: 16/SEQ ID NO: 109 or the CRISPR nuclease/gRNA pair of SEQ ID NO:16/SEQ ID NO: 132 (JW13118); the CRISPR nuclease/gRNA pair of SEQ ID NO: 17/SEQ ID NO: 110 or the CRISPR nuclease/gRNA pair of SEQ ID NO: 17/SEQ ID NO: 133 (JW13119); the CRISPR nuclease/gRNA pair of SEQ ID NO:18/SEQ ID NO: 111 or the CRISPR nuclease/gRNA pair of SEQ ID NO:18/SEQ ID NO: 134 (JW13120); the CRISPR nuclease/gRNA pair of SEQ ID NO: 19/SEQ ID NO: 112 or the CRISPR nuclease/gRNA pair of SEQ ID NO: 19/SEQ ID NO: 135 (JW13121); the CRISPR nuclease/gRNA pair of SEQ ID NO:20/SEQ ID NO: 113 or the CRISPR nuclease/gRNA pair of SEQ ID NO:20/SEQ ID NO: 136 (JW13122); the CRISPR nuclease/gRNA pair of SEQ ID NO:21/SEQ ID NO: 114 or the CRISPR nuclease/gRNA pair of SEQ ID NO:21/SEQ ID NO: 137 (JW13123); the CRISPR nuclease/gRNA pair of SEQ ID NO:22/SEQ ID NO: 115 or the CRISPR nuclease/gRNA pair of SEQ ID NO:22/SEQ ID NO: 138 (JW13124); the CRISPR nuclease/gRNA pair of SEQ ID NO:23/SEQ ID NO: 116 or the CRISPR nuclease/gRNA pair of SEQ ID NO:23/SEQ ID NO: 139 (JW13125); the CRISPR nuclease/gRNA pair of SEQ ID NO:24/SEQ ID NO: 140 or the CRISPR nuclease/gRNA pair of SEQ ID NO:24/SEQ ID NO: 164 (JW13126); the CRISPR nuclease/gRNA pair of SEQ ID NO:25/SEQ ID NO: 141 or the CRISPR nuclease/gRNA pair of SEQ ID NO:25/SEQ ID NO: 165 (JW13127); the CRISPR nuclease/gRNA pair of SEQ ID NO:26/SEQ ID NO: 142 or the CRISPR nuclease/gRNA pair of SEQ ID NO:26/SEQ ID NO: 166 (JW13128); the CRISPR nuclease/gRNA pair of SEQ ID NO:27/SEQ ID NO: 143 or the CRISPR nuclease/gRNA pair of SEQ ID NO:27/SEQ ID NO: 167 (JW13129); the CRISPR nuclease/gRNA pair of SEQ ID NO:28/SEQ ID NO: 144 or the CRISPR nuclease/gRNA pair of SEQ ID NO:28/SEQ ID NO: 168 (JW13130); the CRISPR nuclease/gRNA pair of SEQ ID NO:29/SEQ ID NO: 145 or the CRISPR nuclease/gRNA pair of SEQ ID NO:29/SEQ ID NO: 169 (JW13131); the CRISPR nuclease/gRNA pair of SEQ ID NO:30/SEQ ID NO: 146 or the CRISPR nuclease/gRNA pair of SEQ ID NO:30/SEQ ID NO: 170 (JW13132); the CRISPR nuclease/gRNA pair of SEQ ID NO:31/SEQ ID NO: 147 or the CRISPR nuclease/gRNA pair of SEQ ID NO:31/SEQ ID NO: 171 (JW13133); the CRISPR nuclease/gRNA pair of SEQ ID NO:32/SEQ ID NO: 148 or the CRISPR nuclease/gRNA pair of SEQ ID NO:32/SEQ ID NO: 172 (JW13134); the CRISPR nuclease/gRNA pair of SEQ ID NO:33/SEQ ID NO: 149 or the CRISPR nuclease/gRNA pair of SEQ ID NO:33/SEQ ID NO: 173 (JW13135); the CRISPR nuclease/gRNA pair of SEQ ID NO:34/SEQ ID NO: 150 or the CRISPR nuclease/gRNA pair of SEQ ID NO:34/SEQ ID NO: 174 (JW13136); the CRISPR nuclease/gRNA pair of SEQ ID NO:35/SEQ ID NO: 151 or the CRISPR nuclease/gRNA pair of SEQ ID NO:35/SEQ ID NO: 175 (JW13137); the CRISPR nuclease/gRNA pair of SEQ ID NO:36/SEQ ID NO: 152 or the CRISPR nuclease/gRNA pair of SEQ ID NO:36/SEQ ID NO: 176 (JW13138); the CRISPR nuclease/gRNA pair of SEQ ID NO:37/SEQ ID NO: 153 or the CRISPR nuclease/gRNA pair of SEQ ID NO:37/SEQ ID NO: 177 (JW13139); the CRISPR nuclease/gRNA pair of SEQ ID NO:38/SEQ ID NO: 154 or the CRISPR nuclease/gRNA pair of SEQ ID NO:38/SEQ ID NO: 178 (JW13140); the CRISPR nuclease/gRNA pair of SEQ ID NO:39/SEQ ID NO: 155 or the CRISPR nuclease/gRNA pair of SEQ ID NO:39/SEQ ID NO: 179 (JW13141); the CRISPR nuclease/gRNA pair of SEQ ID NO:40/SEQ ID NO: 156 or the CRISPR nuclease/gRNA pair of SEQ ID NO:40/SEQ ID NO: 180 (JW13142); the CRISPR nuclease/gRNA pair of SEQ ID NO:41/SEQ ID NO: 157 or the CRISPR nuclease/gRNA pair of SEQ ID NO:41/SEQ ID NO: 181 (JW13143); the CRISPR nuclease/gRNA pair of SEQ ID NO:42/SEQ ID NO: 158 or the CRISPR nuclease/gRNA pair of SEQ ID NO:42/SEQ ID NO: 182 (JW13144); the CRISPR nuclease/gRNA pair of SEQ ID NO:43/SEQ ID NO: 159 or the CRISPR nuclease/gRNA pair of SEQ ID NO:43/SEQ ID NO: 183 (JW13145); the CRISPR nuclease/gRNA pair of SEQ ID NO:44/SEQ ID NO: 160 or the CRISPR nuclease/gRNA pair of SEQ ID NO:44/SEQ ID NO: 184 (JW13146); the CRISPR nuclease/gRNA pair of SEQ ID NO:45/SEQ ID NO: 161 or the CRISPR nuclease/gRNA pair of SEQ ID NO:45/SEQ ID NO: 185 (JW13147); the CRISPR nuclease/gRNA pair of SEQ ID NO:46/SEQ ID NO: 162 or the CRISPR nuclease/gRNA pair of SEQ ID NO:46/SEQ ID NO: 186 (JW13148); the CRISPR nuclease/gRNA pair of SEQ ID NO:47/SEQ ID NO: 163 or the CRISPR nuclease/gRNA pair of SEQ ID NO:47/SEQ ID NO: 187 (JW13149); the CRISPR nuclease/gRNA pair of SEQ ID NO:48/SEQ ID NO: 188 or the CRISPR nuclease/gRNA pair of SEQ ID NO:48/SEQ ID NO: 234 (JW13150); the CRISPR nuclease/gRNA pair of SEQ ID NO:49/SEQ ID NO: 189 or the CRISPR nuclease/gRNA pair of SEQ ID NO:49/SEQ ID NO: 235 (JW13153); the CRISPR nuclease/gRNA pair of SEQ ID NO:50/SEQ ID NO: 190 or the CRISPR nuclease/gRNA pair of SEQ ID NO:50/SEQ ID NO: 236 (JW13154); the CRISPR nuclease/gRNA pair of SEQ ID NO:51/SEQ ID NO: 191 or the CRISPR nuclease/gRNA pair of SEQ ID NO:51/SEQ ID NO: 237 (JW13155); the CRISPR nuclease/gRNA pair of SEQ ID NO:52/SEQ ID NO: 192 or the CRISPR nuclease/gRNA pair of SEQ ID NO:52/SEQ ID NO: 238 (JW13156); the CRISPR nuclease/gRNA pair of SEQ ID NO:53/SEQ ID NO: 193 or the CRISPR nuclease/gRNA pair of SEQ ID NO:53/SEQ ID NO: 239 (JW13157); the CRISPR nuclease/gRNA pair of SEQ ID NO:54/SEQ ID NO: 194 or the CRISPR nuclease/gRNA pair of SEQ ID NO:54/SEQ ID NO: 240 (JW13158); the CRISPR nuclease/gRNA pair of SEQ ID NO:55/SEQ ID NO: 195 or the CRISPR nuclease/gRNA pair of SEQ ID NO:55/SEQ ID NO: 241 (JW13159); the CRISPR nuclease/gRNA pair of SEQ ID NO:56/SEQ ID NO: 196 or the CRISPR nuclease/gRNA pair of SEQ ID NO:56/SEQ ID NO: 242 (JW13160); the CRISPR nuclease/gRNA pair of SEQ ID NO:57/SEQ ID NO: 197 or the CRISPR nuclease/gRNA pair of SEQ ID NO:57/SEQ ID NO: 243 (JW13161); the CRISPR nuclease/gRNA pair of SEQ ID NO:58/SEQ ID NO: 198 or the CRISPR nuclease/gRNA pair of SEQ ID NO:58/SEQ ID NO: 244 (JW13162); the CRISPR nuclease/gRNA pair of SEQ ID NO:59/SEQ ID NO: 199 or the CRISPR nuclease/gRNA pair of SEQ ID NO:59/SEQ ID NO: 245 (JW13163); the CRISPR nuclease/gRNA pair of SEQ ID NO:60/SEQ ID NO: 200 or the CRISPR nuclease/gRNA pair of SEQ ID NO:60/SEQ ID NO: 246 (JW13164); the CRISPR nuclease/gRNA pair of SEQ ID NO:61/SEQ ID NO: 201 or the CRISPR nuclease/gRNA pair of SEQ ID NO:61/SEQ ID NO: 247 (JW13165); the CRISPR nuclease/gRNA pair of SEQ ID NO:62/SEQ ID NO: 202 or the CRISPR nuclease/gRNA pair of SEQ ID NO:62/SEQ ID NO: 248 (JW13166); the CRISPR nuclease/gRNA pair of SEQ ID NO:63/SEQ ID NO: 203 or the CRISPR nuclease/gRNA pair of SEQ ID NO:63/SEQ ID NO: 249 (JW13167); the CRISPR nuclease/gRNA pair of SEQ ID NO:64/SEQ ID NO: 204 or the CRISPR nuclease/gRNA pair of SEQ ID NO:64/SEQ ID NO: 250 (JW13168); the CRISPR nuclease/gRNA pair of SEQ ID NO:65/SEQ ID NO: 205 or the CRISPR nuclease/gRNA pair of SEQ ID NO:65/SEQ ID NO: 251 (JW13169); the CRISPR nuclease/gRNA pair of SEQ ID NO:66/SEQ ID NO: 206 or the CRISPR nuclease/gRNA pair of SEQ ID NO:66/SEQ ID NO: 252 (JW13170); the CRISPR nuclease/gRNA pair of SEQ ID NO:67/SEQ ID NO: 207 or the CRISPR nuclease/gRNA pair of SEQ ID NO:67/SEQ ID NO: 253 (JW13171); the CRISPR nuclease/gRNA pair of SEQ ID NO:68/SEQ ID NO: 208 or the CRISPR nuclease/gRNA pair of SEQ ID NO:68/SEQ ID NO: 254 (JW13172); the CRISPR nuclease/gRNA pair of SEQ ID NO:69/SEQ ID NO: 209 or the CRISPR nuclease/gRNA pair of SEQ ID NO:69/SEQ ID NO: 255 (JW13173); the CRISPR nuclease/gRNA pair of SEQ ID NO:70/SEQ ID NO: 210 or the CRISPR nuclease/gRNA pair of SEQ ID NO:70/SEQ ID NO: 256 (JW13174); the CRISPR nuclease/gRNA pair of SEQ ID NO:71/SEQ ID NO: 211 or the CRISPR nuclease/gRNA pair of SEQ ID NO:71/SEQ ID NO: 257 (JW13175); the CRISPR nuclease/gRNA pair of SEQ ID NO:72/SEQ ID NO: 212 or the CRISPR nuclease/gRNA pair of SEQ ID NO:72/SEQ ID NO: 258 (JW13176); the CRISPR nuclease/gRNA pair of SEQ ID NO:73/SEQ ID NO: 213 or the CRISPR nuclease/gRNA pair of SEQ ID NO:73/SEQ ID NO: 259 (JW13177); the CRISPR nuclease/gRNA pair of SEQ ID NO:74/SEQ ID NO: 214 or the CRISPR nuclease/gRNA pair of SEQ ID NO:74/SEQ ID NO: 260 (JW13178); the CRISPR nuclease/gRNA pair of SEQ ID NO:75/SEQ ID NO: 215 or the CRISPR nuclease/gRNA pair of SEQ ID NO:75/SEQ ID NO: 261 (JW13179); the CRISPR nuclease/gRNA pair of SEQ ID NO:76/SEQ ID NO: 216 or the CRISPR nuclease/gRNA pair of SEQ ID NO:76/SEQ ID NO: 262 (JW13180); the CRISPR nuclease/gRNA pair of SEQ ID NO:77/SEQ ID NO: 217 or the CRISPR nuclease/gRNA pair of SEQ ID NO:77/SEQ ID NO: 263 (JW13181); the CRISPR nuclease/gRNA pair of SEQ ID NO:78/SEQ ID NO: 218 or the CRISPR nuclease/gRNA pair of SEQ ID NO:78/SEQ ID NO: 264 (JW13182); the CRISPR nuclease/gRNA pair of SEQ ID NO:79/SEQ ID NO: 219 or the CRISPR nuclease/gRNA pair of SEQ ID NO:79/SEQ ID NO: 265 (JW13183); the CRISPR nuclease/gRNA pair of SEQ ID NO:80/SEQ ID NO: 220 or the CRISPR nuclease/gRNA pair of SEQ ID NO:80/SEQ ID NO: 266 (JW13184); the CRISPR nuclease/gRNA pair of SEQ ID NO:81/SEQ ID NO: 221 or the CRISPR nuclease/gRNA pair of SEQ ID NO:81/SEQ ID NO: 267 (JW13185); the CRISPR nuclease/gRNA pair of SEQ ID NO:82/SEQ ID NO: 222 or the CRISPR nuclease/gRNA pair of SEQ ID NO:82/SEQ ID NO: 268 (JW13186); the CRISPR nuclease/gRNA pair of SEQ ID NO:83/SEQ ID NO: 223 or the CRISPR nuclease/gRNA pair of SEQ ID NO:83/SEQ ID NO: 269 (JW13187); the CRISPR nuclease/gRNA pair of SEQ ID NO:84/SEQ ID NO: 224 or the CRISPR nuclease/gRNA pair of SEQ ID NO:84/SEQ ID NO: 270 (JW13188); the CRISPR nuclease/gRNA pair of SEQ ID NO:85/SEQ ID NO: 225 or the CRISPR nuclease/gRNA pair of SEQ ID NO:85/SEQ ID NO: 271 (JW13189); the CRISPR nuclease/gRNA pair of SEQ ID NO:86/SEQ ID NO: 226 or the CRISPR nuclease/gRNA pair of SEQ ID NO:86/SEQ ID NO: 272 (JW13190); the CRISPR nuclease/gRNA pair of SEQ ID NO:87/SEQ ID NO: 227 or the CRISPR nuclease/gRNA pair of SEQ ID NO:87/SEQ ID NO: 273 (JW13191); the CRISPR nuclease/gRNA pair of SEQ ID NO:88/SEQ ID NO: 228 or the CRISPR nuclease/gRNA pair of SEQ ID NO:88/SEQ ID NO: 274 (JW13192); the CRISPR nuclease/gRNA pair of SEQ ID NO:89/SEQ ID NO: 229 or the CRISPR nuclease/gRNA pair of SEQ ID NO:89/SEQ ID NO: 275 (JW13193); the CRISPR nuclease/gRNA pair of SEQ ID NO:90/SEQ ID NO: 230 or the CRISPR nuclease/gRNA pair of SEQ ID NO:90/SEQ ID NO: 276 (JW13194); the CRISPR nuclease/gRNA pair of SEQ ID NO:91/SEQ ID NO: 231 or the CRISPR nuclease/gRNA pair of SEQ ID NO:91/SEQ ID NO: 277 (JW13195); the CRISPR nuclease/gRNA pair of SEQ ID NO:92/SEQ ID NO: 232 or the CRISPR nuclease/gRNA pair of SEQ ID NO:92/SEQ ID NO: 278 (JW13196); and/or the CRISPR nuclease/gRNA pair of SEQ ID NO:93/SEQ ID NO: 233 or the CRISPR nuclease/gRNA pair of SEQ ID NO:93/SEQ ID NO: 279 (JW13197). In particular instances, the CRISPR nuclease/gRNA pair is SEQ ID NO:22/SEQ ID NO: 115 or the CRISPR nuclease/gRNA pair of SEQ ID NO:22/SEQ ID NO: 138. A subject nucleic acid-guided nuclease capable of complexing with a guide nucleic acid can be referred to as a nucleic acid-guided nuclease that is compatible with the guide nucleic acid. Likewise, a guide nucleic acid capable of complexing with a nucleic acid-guided nuclease can be referred to as a guide nucleic acid that is compatible with the nucleic acid-guided nucleases.

[0059] In cases where the guide nucleic acid comprises RNA, the RNA guide nucleic acid can be encoded by a DNA sequence on a polynucleotide molecule such as a plasmid, linear construct, or editing cassette as disclosed herein. See, e.g., SEQ ID Nos: 280-372. A guide nucleic acid can comprise modified of non-naturally occurring nucleotides. A guide nucleic acid can comprise deoxyribonucleotides (DNA). A guide nucleic acid can comprise both DNA and RNA. A guide nucleic acid can comprise modified of non-naturally occurring nucleotides.

### Methods

[0060] All of the functionalities described in connection with the devices, systems, and processes described herein are intended to be applicable to detection of at least one target microorganism from a sample. The sample can comprise a mixture of viral nucleic acids, mammalian nucleic acids, and bacterial nucleic acids.

[0061] In some aspects the disclosure provides a method of detecting a target nucleic acid, the method comprising: contacting a sample with a nucleic acid-guided nuclease system comprising: a nucleic acid-guided CRISPR nuclease having at least 90% identity to SEQ ID NO: 1-93, or a nucleic acid molecule encoding the nucleic acid-guided CRISPR nuclease; a guide nucleic acid for complexing with the nucleic acid-guided CRISPR nuclease, or a nucleic acid molecule encoding the guide nucleic acid; and allowing the target nucleic acid to activate the nucleic acid-guided CRISPR nuclease system to cleave a detectable substrate.

[0062] In certain implementations of this method, the reaction mixtures and enzyme systems described herein are configured for the detection of one or more of SARS-CoV-2, influenza A, influenza B, Human Respiratory Syncytial Virus (RSV). In other cases, the reaction mixtures and enzyme systems described herein are configured for the detection of one or more of SARS-CoV-2, influenza A, influenza B, Human Respiratory Syncytial Virus (RSV), adenovirus, coronavirus 229E, coronavirus HKU1, coronavirus NL63, human metapneumovirus, human rhinovirus/enterovirus, parainfluenza virus 1, parainfluenza virus 2, parainfluenza virus 3, parainfluenza virus 4.

### Reaction Mixtures, Enzyme Systems, and Substrates

[0063] In some aspects, the disclosure provides reaction mixtures and enzyme systems that provide functional complexes with nuclease activity. A CRISPR reaction mixture typically contains a nucleic acid-guided nuclease (CRISPR nuclease), a guide nucleic acid (gRNA), a substrate for the complex, and optionally, depending on the enzyme, any co-factors (e.g., divalent cations such as Mg²⁺) that may be required for activation of the enzyme. The reaction mixture may comprise a substrate for the enzyme, such as an RNA or DNA molecule. The substrate may be labeled with a detectable moiety. The reaction mixture may have activity in a buffer that supports optimal pH and ionic conditions for the reaction, but in some cases the reaction mixture may be active in solutions that do not necessarily provide buffering. In preferred cases, the nucleic acid-guided CRISPR nuclease has trans-cleavage (i.e., collateral) activity, and indiscriminately cleaves nucleic acid substrates in the solution.

[0064] In some instances, the substrate for the complex is functionally connected to a detectable moiety. The detectable moiety can be conjugated onto any nucleotide substrate of suitable length so long as it does not inhibit cleavage of the nucleic acid by an activated CRISPR enzyme complex. A nucleic acid substrate for the complex can be, for e.g., 5, 10, 15, 20, 25, 30, 40, 45, 50, 55, 60, 65, 70, 75, 80, 85, 90, 95, 100, 105, 110, 115, 120, 125, 130, 140, 145, 150, 155, 160, 165, 170, 175, 180, 185, 190, 195, 200 nucleotides in length or larger. In some embodiments, the 5′ end of a nucleotide sequence of the substrate is conjugated to one or more (e.g., one, two, three, four, five, or more) detectable moieties. In some embodiments, the 3′ end of a nucleotide sequence of the substrate is conjugated to one or more (e.g., one, two, three, four, five, or more) detectable moieties. In some embodiments, the detectable moiety is a fluorophore complexed with a quencher for the fluorophore. In some embodiments, the detectable moiety itself is conjugated to the signal-producing agent. In some embodiments, the detectable moiety is a molecule that can bind a binding partner and the binding partner is linked to a signal producing agent. For example, in some embodiments, the detectable moiety is biotin and the binding partner is streptavidin or vice-versa. The signal-producing agent can be any agent that produces quantifiable signal, including but not limited to, chemiluminescence, color, or fluorescence. Non-limiting examples of signal-producing agents include an enzyme, a fluorescent molecule, or the like. In some embodiments, the substrate is a ribonucleic acid molecule (RNA) complexed with biotin. In some embodiments, the detectable label is biotin and the method comprises contacting the detectable label with a streptavidin-linked signal producing agent. In some instances, the reaction mixture or the system may comprise a general RNAase inhibitor to minimize signals that are not specifically generated by activation of the CRISPR enzyme.

[0065] The substrate for the complex can be present in the reaction mixture in any suitable concentration for detection by the CRISPR enzyme. In some cases, the substrate is present in the reaction mix in a concentration ranging from 10 nM to 1,000 nM, from 20 nM to 1,000 nM, from 30 nM to 1,000 nM, from 40 nM to 1,000 nM, from 50 nM to 1,000 nM, from 60 nM to 1,000 nM, from 70 nM to 1,000 nM, from 80 nM to 1,000 nM, from 90 nM to 1,000 nM, from 100 nM to 1,000 nM, from 110 nM to 1,000 nM, from 120 nM to 1,000 nM, from 130 nM to 1,000 nM, from 140 nM to 1,000 nM, from 150 nM to 1,000 nM, from 160 nM to 1,000 nM, from 170 nM to 1,000 nM, from 180 nM to 1,000 nM, from 190 nM to 1,000 nM, from 200 nM to 1,000 nM, from 210 nM to 1,000 nM, from 220 nM to 1,000 nM, from 230 nM to 1,000 nM, from 240 nM to 1,000 nM, from 250 nM to 1,000 nM, 10 nM to 750 nM, from 20 nM to 750 nM, from 30 nM to 750 nM, from 40 nM to 750 nM, from 50 nM to 750 nM, from 60 nM to 750 nM, from 70 nM to 750 nM, from 80 nM to 750 nM, from 90 nM to 750 nM, from 100 nM to 750 nM, from 110 nM to 750 nM, from 120 nM to 750 nM, from 130 nM to 750 nM, from 140 nM to 750 nM, from 150 nM to 750 nM, from 160 nM to 750 nM, from 170 nM to 750 nM, from 180 nM to 750 nM, from 190 nM to 750 nM, from 200 nM to 750 nM, from 210 nM to 750 nM, from 220 nM to 750 nM, from 230 nM to 750 nM, from 240 nM to 750 nM, from 250 nM to 750 nM, 10 nM to 500 nM, from 20 nM to 500 nM, from 30 nM to 500 nM, from 40 nM to 500 nM, from 50 nM to 500 nM, from 60 nM to 500 nM, from 70 nM to 500 nM, from 80 nM to 500 nM, from 90 nM to 500 nM, from 100 nM to 500 nM, from 110 nM to 500 nM, from 120 nM to 500 nM, from 130 nM to 500 nM, from 140 nM to 500 nM, from 150 nM to 500 nM, from 160 nM to 500 nM, from 170 nM to 500 nM, from 180 nM to 500 nM, from 190 nM to 500 nM, from 200 nM to 500 nM, from 210 nM to 500 nM, from 220 nM to 500 nM, from 230 nM to 500 nM, from 240 nM to 500 nM, from 250 nM to 500 nM, 10 nM to 450 nM, from 20 nM to 450 nM, from 30 nM to 450 nM, from 40 nM to 450 nM, from 50 nM to 450 nM, from 60 nM to 450 nM, from 70 nM to 450 nM, from 80 nM to 450 nM, from 90 nM to 450 nM, from 100 nM to 450 nM, from 110 nM to 450 nM, from 120 nM to 450 nM, from 130 nM to 450 nM, from 140 nM to 450 nM, from 150 nM to 450 nM, from 160 nM to 450 nM, from 170 nM to 450 nM, from 180 nM to 450 nM, from 190 nM to 450 nM, from 200 nM to 450 nM, from 210 nM to 450 nM, from 220 nM to 450 nM, from 230 nM to 450 nM, from 240 nM to 450 nM, from 250 nM to 450 nM, 10 nM to 400 nM, from 20 nM to 400 nM, from 30 nM to 400 nM, from 40 nM to 400 nM, from 50 nM to 400 nM, from 60 nM to 450 nM, from 70 nM to 450 nM, from 80 nM to 450 nM, from 90 nM to 450 nM, from 100 nM to 400 nM, from 110 nM to 400 nM, from 120 nM to 400 nM, from 130 nM to 400 nM, from 140 nM to 400 nM, from 150 nM to 400 nM, from 160 nM to 400 nM, from 170 nM to 400 nM, from 180 nM to 400 nM, from 190 nM to 400 nM, from 200 nM to 400 nM, from 210 nM to 400 nM, from 220 nM to 400 nM, from 230 nM to 400 nM, from 240 nM to 400 nM, from 250 nM to 400 nM.

[0066] In some cases, the substrate is present in the reaction mix in a concentration of no more than 10 nM, no more than 20 nM, no more than 30 nM, no more than 40 nM, no more than 50 nM, no more than 60 nM, no more than 70 nM, no more than 80 nM, no more than 90 nM, no more than 100 nM, no more than 110 nM, no more than 120 nM, no more than 130 nM, no more than 140 nM, no more than 150 nM, no more than 160 nM, no more than 170 nM, no more than 180 nM, no more than 190 nM, no more than 200 nM, no more than 210 nM, no more than 220 nM, no more than 230 nM, no more than 240 nM, no more than 250 nM, no more than 260 nM, no more than 270 nM, no more than 280 nM, no more than 290 nM, no more than 300 nM, no more than 310 nM, no more than 320 nM, no more than 330 nM, no more than 340 nM, no more than 350 nM, no more than 360 nM, no more than 370 nM, no more than 380 nM, no more than 390 nM, no more than 410 nM, no more than 420 nM, no more than 430 nM, no more than 440 nM, no more than 450 nM, no more than 460 nM, no more than 470 nM, no more than 480 nM, no more than 490 nM, no more than 500 nM, no more than 510 nM, no more than 520 nM, no more than 530 nM, no more than 540 nM, no more than 550 nM, no more than 560 nM, no more than 570 nM, no more than 580 nM, no more than 590 nM, no more than 600 nM, no more than 610 nM, no more than 620 nM, no more than 630 nM, no more than 640 nM, no more than 650 nM, no more than 660 nM, no more than 670 nM, no more than 680 nM, no more than 690 nM, no mora than 700 nM, no more than 710 nM, no more than 720 nM, no more than 730 nM, no more than 740 nM, no more than 750 nM, no more than 800 nM, no more than 850 nM, no more than 900 nM, no more than 950 nM, no more than 1,000 nM, no more than 2,000 nM, no more than 3,000 nM, no more than 4,000 nM, no more than 5,000 nM, no more than 6,000 nM, no more than 7,000 nM, no more than 8,000 nM, or another suitable amount.

[0067] In some embodiments a target sequence is present in the reaction mixture, whereby the target sequence activates cleavage of a substrate by the nucleic acid-guided CRISPR nuclease. In such instances the reaction mixture may be said to produce a “positive” result, or a positive identification of a presence of at least a minimum concentration of the target sequence.

[0068] Functional activity of the CRISPR enzyme/gRNA complex can be drive by an amount of gRNA in the reaction mixture available to form a complex with the CRISPR enzyme. In some cases, a gRNA can be present in the reaction mix in a concentration ranging from 10 ng/uL to 500 ng/uL, from 10 ng/uL to 490 ng/uL, from 10 ng/uL to 480 ng/uL, from 10 ng/uL to 470 ng/uL, from 10 ng/uL to 460 ng/uL, from 10 ng/uL to 450 ng/uL, from 10 ng/uL to 440 ng/uL, from 10 ng/uL to 430 ng/uL, from 10 ng/uL to 420 ng/uL, from 10 ng/uL to 410 ng/uL, from 10 ng/uL to 400 ng/uL, from 10 ng/uL to 390 ng/uL, from 10 ng/uL to 380 ng/uL, from 10 ng/uL to 370 ng/uL, from 10 ng/uL to 360 ng/uL, from 10 ng/uL to 350 ng/uL, from 10 ng/uL to 340 ng/uL, from 10 ng/uL to 330 ng/uL, from 10 ng/uL to 320 ng/uL, from 10 ng/uL to 310 ng/uL, from 10 ng/uL to 300 ng/uL, from 10 ng/uL to 290 ng/uL, from 10 ng/uL to 280 ng/uL, from 10 ng/uL to 270 ng/uL, from 10 ng/uL to 260 ng/uL, from 10 ng/uL to 250 ng/uL, from 10 ng/uL to 240 ng/uL, from 10 ng/uL to 230 ng/uL, from 10 ng/uL to 220 ng/uL, from 10 ng/uL to 210 ng/uL, from 10 ng/uL to 200 ng/uL, from 10 ng/uL to 190 ng/uL, from 10 ng/uL to 180 ng/uL, from 10 ng/uL to 170 ng/uL, from 10 ng/uL to 160 ng/uL, from 10 ng/uL to 150 ng/uL, from 10 ng/uL to 140 ng/uL, from 10 ng/uL to 130 ng/uL, from 10 ng/uL to 120 ng/uL, from 10 ng/uL to 110 ng/uL, from 10 ng/uL to 100 ng/uL.

[0069] In some instances the nucleic acid-guided CRISPR nuclease cleaves the substrate with a sensitivity of at least 20 nM, at least 21 nM, at least 22 nM, at least 23 nM, at least 24 nM, at least 25 nM, at least 26 nM, at least 27 nM, at least 28 nM, at least 29 nM, at least 30 nM, at least 31 nM, at least 32 nM, at least 33 nM, at least 34 nM, at least 35 nM, at least 36 nM, at least 37 nM, at least 38 nM, at least 39 nM, at least 40 nM, at least 41 nM, at least 42 nM, at least 43 nM, at least 44 nM, at least 45 nM, at least 46 nM, at least 47 nM, at least 48 nM, at least 49 nM, at least 50 nM, at least 51 nM, at least 52 nM, at least 53 nM, at least 54 nM, at least 55 nM, at least 56 nM, at least 57 nM, at least 58 nM, at least 59 nM, at least 60 nM, at least 61 nM, at least 62 nM, at least 63 nM, at least 64 nM, at least 65 nM, at least 66 nM, at least 67 nM, at least 68 nM, at least 69 nM, at least 70 nM, at least 71 nM, at least 72 nM, at least 73 nM, at least 74 nM, at least 75 nM, at least 76 nM, at least 77 nM, at least 78 nM, at least 79 nM, at least 80 nM, at least 81 nM, at least 82 nM, at least 83 nM, at least 84 nM, at least 85 nM, at least 86 nM, at least 87 nM, at least 88 nM, at least 89 nM, at least 90 nM, at least 91 nM, at least 92 nM, at least 93 nM, at least 94 nM, at least 95 nM, at least 96 nM, at least 97 nM, at least 98 nM, at least 99 nM, or at least 100 nM. In some instances, a CRISPR enzyme of the disclosure JW13124 (SEQ ID NO: 22) complexed with a compatible gRNA (e.g., a gRNA comprising a direct repeat of SEQ ID NO: 395) cleaves a nucleic acid sequence at least 5%, at least 10%, at least 15%, at least 20%, at least 25%, at least 30%, at least 35%, at least 40%, at least 45%, at least 50%, at least 55%, at least 60%, at least 65%, at least 65%, at least 70%, at least 75%, at least 80%, at least 85%, at least 90%, at least 95%, at least 100%, at least 110%, at least 115%, at least 120%, at least 125%, at least 130%, at least 135%, at least 140%, at least 145%, at least 150%, at least 155%, at least 160%, at least 165%, at least 165%, at least 170%, at least 175%, at least 180%, at least 185%, at least 190%, at least 195%, at least 200%, more efficiently than LwaCas13a when activated by binding of a target sequence.

[0070] In some instances, the reaction mixture further comprises one or more additional nucleic acid sequences that share a percent complementarity to at least a portion of a target or a non-target sequence. Upon binding to the target sequence (complementary to the spacer region of the gRNA), the gRNA/CRISPR complex will get activated and nuclease activity will ensue. Such nucleic acids can be present in the reaction mix in a concentration ranging from 10 ng/uL to 500 ng/uL, from 10 ng/uL to 490 ng/uL, from 10 ng/uL to 480 ng/uL, from 10 ng/uL to 470 ng/uL, from 10 ng/uL to 460 ng/uL, from 10 ng/uL to 450 ng/uL, from 10 ng/uL to 440 ng/uL, from 10 ng/uL to 430 ng/uL, from 10 ng/uL to 420 ng/uL, from 10 ng/uL to 410 ng/uL, from 10 ng/uL to 400 ng/uL, from 10 ng/uL to 390 ng/uL, from 10 ng/uL to 380 ng/uL, from 10 ng/uL to 370 ng/uL, from 10 ng/uL to 360 ng/uL, from 10 ng/uL to 350 ng/uL, from 10 ng/uL to 340 ng/uL, from 10 ng/uL to 330 ng/uL, from 10 ng/uL to 320 ng/uL, from 10 ng/uL to 310 ng/uL, from 10 ng/uL to 300 ng/uL, from 10 ng/uL to 290 ng/uL, from 10 ng/uL to 280 ng/uL, from 10 ng/uL to 270 ng/uL, from 10 ng/uL to 260 ng/uL, from 10 ng/uL to 250 ng/uL, from 10 ng/uL to 240 ng/uL, from 10 ng/uL to 230 ng/uL, from 10 ng/uL to 220 ng/uL, from 10 ng/uL to 210 ng/uL, from 10 ng/uL to 200 ng/uL, from 10 ng/uL to 190 ng/uL, from 10 ng/uL to 180 ng/uL, from 10 ng/uL to 170 ng/uL, from 10 ng/uL to 160 ng/uL, from 10 ng/uL to 150 ng/uL, from 10 ng/uL to 140 ng/uL, from 10 ng/uL to 130 ng/uL, from 10 ng/uL to 120 ng/uL, from 10 ng/uL to 110 ng/uL, from 10 ng/uL to 100 ng/uL.

### EMBODIMENTS

[0071] Embodiment 1. In some Embodiments, the disclosure provides a reaction mixture comprising: a nucleic acid-guided CRISPR nuclease (CRISPR nuclease) having at least 85% amino acid homology to any one of SEQ ID NOs:1-93; a guide nucleic acid (gRNA) for complexing with the nucleic acid-guided CRISPR nuclease, thereby providing a complex comprising a nucleic acid-guided CRISPR nuclease/gRNA pair, wherein the gRNA comprises a nucleic acid sequence, e.g., a gRNA sequence, and wherein the nucleic acid sequence comprises (i) a direct repeat sequence having at least 65%, at least 85%, at least 90%, or at least 95% nucleic acid homology to any one of SEQ ID NOs:374-466, and optionally (ii) a nucleic acid sequence having at least 85% nucleic acid homology to any one of SEQ ID NOs:94-279 (e.g., FluA target); and a substrate for the complex, optionally wherein the reaction mixture is in solution, further optionally wherein the solution comprises a buffer that supports optimal pH and ionic conditions for the reaction.

[0072] Embodiment 2. The reaction mixture of Embodiment 1, wherein the nucleic acid-guided CRISPR nuclease has at least 90% amino acid homology to any one of SEQ ID NOs:1-93.

[0073] Embodiment 3. The reaction mixture of any one of Embodiments 1 or 2, wherein the nucleic acid-guided CRISPR nuclease has at least 95% amino acid homology to any one of SEQ ID NOs:1-93.

[0074] Embodiment 4. The reaction mixture of any one of Embodiments 1-3, wherein the nucleic acid-guided CRISPR nuclease has at least 99% amino acid homology to any one of SEQ ID NOs:1-93.

[0075] Embodiment 5. The reaction mixture of any one of Embodiments 1-4, wherein the nucleic acid-guided CRISPR nuclease and the guide nucleic acid comprise a nucleic acid-guided CRISPR nuclease/gRNA pair selected from the group consisting of: the CRISPR nuclease/gRNA pair of SEQ ID NO:1/SEQ ID NO: 94 or the CRISPR nuclease/gRNA pair of SEQ ID NO:1/SEQ ID NO: 117; the CRISPR nuclease/gRNA pair of SEQ ID NO:2/SEQ ID NO: 95 or the CRISPR nuclease/gRNA pair of SEQ ID NO:2/SEQ ID NO: 118; the CRISPR nuclease/gRNA pair of SEQ ID NO:3/SEQ ID NO: 96 or the CRISPR nuclease/gRNA pair of SEQ ID NO:3/SEQ ID NO: 119; the CRISPR nuclease/gRNA pair of SEQ ID NO:4/SEQ ID NO: 97 or the CRISPR nuclease/gRNA pair of SEQ ID NO:4/SEQ ID NO: 120; the CRISPR nuclease/gRNA pair of SEQ ID NO:5/SEQ ID NO: 98 or the CRISPR nuclease/gRNA pair of SEQ ID NO:5/SEQ ID NO: 121; the CRISPR nuclease/gRNA pair of SEQ ID NO:6/SEQ ID NO: 99 or the CRISPR nuclease/gRNA pair of SEQ ID NO:6/SEQ ID NO: 122; the CRISPR nuclease/gRNA pair of SEQ ID NO:7/SEQ ID NO: 100 or the CRISPR nuclease/gRNA pair of SEQ ID NO:7/SEQ ID NO: 123; the CRISPR nuclease/gRNA pair of SEQ ID NO:8/SEQ ID NO: 101 or the CRISPR nuclease/gRNA pair of SEQ ID NO:8/SEQ ID NO: 124; the CRISPR nuclease/gRNA pair of SEQ ID NO:9/SEQ ID NO: 102 or the CRISPR nuclease/gRNA pair of SEQ ID NO:9/SEQ ID NO: 125; the CRISPR nuclease/gRNA pair of SEQ ID NO:10/SEQ ID NO: 103 or the CRISPR nuclease/gRNA pair of SEQ ID NO:10/SEQ ID NO: 126; the CRISPR nuclease/gRNA pair of SEQ ID NO: 11/SEQ ID NO: 104 or the CRISPR nuclease/gRNA pair of SEQ ID NO: 11/SEQ ID NO: 127; the CRISPR nuclease/gRNA pair of SEQ ID NO: 12/SEQ ID NO: 105 or the CRISPR nuclease/gRNA pair of SEQ ID NO:12/SEQ ID NO: 128; the CRISPR nuclease/gRNA pair of SEQ ID NO:13/SEQ ID NO: 106 or the CRISPR nuclease/gRNA pair of SEQ ID NO: 13/SEQ ID NO: 129; the CRISPR nuclease/gRNA pair of SEQ ID NO: 14/SEQ ID NO: 107 or the CRISPR nuclease/gRNA pair of SEQ ID NO: 14/SEQ ID NO: 130; the CRISPR nuclease/gRNA pair of SEQ ID NO: 15/SEQ ID NO: 108 or the CRISPR nuclease/gRNA pair of SEQ ID NO: 15/SEQ ID NO: 131; the CRISPR nuclease/gRNA pair of SEQ ID NO: 16/SEQ ID NO: 109 or the CRISPR nuclease/gRNA pair of SEQ ID NO: 16/SEQ ID NO: 132; the CRISPR nuclease/gRNA pair of SEQ ID NO: 17/SEQ ID NO: 110 or the CRISPR nuclease/gRNA pair of SEQ ID NO:17/SEQ ID NO: 133; the CRISPR nuclease/gRNA pair of SEQ ID NO: 18/SEQ ID NO: 111 or the CRISPR nuclease/gRNA pair of SEQ ID NO: 18/SEQ ID NO: 134; the CRISPR nuclease/gRNA pair of SEQ ID NO: 19/SEQ ID NO: 112 or the CRISPR nuclease/gRNA pair of SEQ ID NO:19/SEQ ID NO: 135; the CRISPR nuclease/gRNA pair of SEQ ID NO:20/SEQ ID NO: 113 or the CRISPR nuclease/gRNA pair of SEQ ID NO:20/SEQ ID NO: 136; the CRISPR nuclease/gRNA pair of SEQ ID NO:21/SEQ ID NO: 114 or the CRISPR nuclease/gRNA pair of SEQ ID NO:21/SEQ ID NO: 137; the CRISPR nuclease/gRNA pair of SEQ ID NO:22/SEQ ID NO: 115 or the CRISPR nuclease/gRNA pair of SEQ ID NO:22/SEQ ID NO: 138; the CRISPR nuclease/gRNA pair of SEQ ID NO:23/SEQ ID NO: 116 or the CRISPR nuclease/gRNA pair of SEQ ID NO:23/SEQ ID NO: 139; the CRISPR nuclease/gRNA pair of SEQ ID NO:24/SEQ ID NO: 140 or the CRISPR nuclease/gRNA pair of SEQ ID NO:24/SEQ ID NO: 164; the CRISPR nuclease/gRNA pair of SEQ ID NO:25/SEQ ID NO: 141 or the CRISPR nuclease/gRNA pair of SEQ ID NO:25/SEQ ID NO: 165; the CRISPR nuclease/gRNA pair of SEQ ID NO:26/SEQ ID NO: 142 or the CRISPR nuclease/gRNA pair of SEQ ID NO:26/SEQ ID NO: 166; the CRISPR nuclease/gRNA pair of SEQ ID NO:27/SEQ ID NO: 143 or the CRISPR nuclease/gRNA pair of SEQ ID NO:27/SEQ ID NO: 167; the CRISPR nuclease/gRNA pair of SEQ ID NO:28/SEQ ID NO: 144 or the CRISPR nuclease/gRNA pair of SEQ ID NO:28/SEQ ID NO: 168; the CRISPR nuclease/gRNA pair of SEQ ID NO:29/SEQ ID NO: 145 or the CRISPR nuclease/gRNA pair of SEQ ID NO:29/SEQ ID NO: 169; the CRISPR nuclease/gRNA pair of SEQ ID NO:30/SEQ ID NO: 146 or the CRISPR nuclease/gRNA pair of SEQ ID NO:30/SEQ ID NO: 170; the CRISPR nuclease/gRNA pair of SEQ ID NO:31/SEQ ID NO: 147 or the CRISPR nuclease/gRNA pair of SEQ ID NO:31/SEQ ID NO: 171; the CRISPR nuclease/gRNA pair of SEQ ID NO:32/SEQ ID NO: 148 or the CRISPR nuclease/gRNA pair of SEQ ID NO:32/SEQ ID NO: 172; the CRISPR nuclease/gRNA pair of SEQ ID NO:33/SEQ ID NO: 149 or the CRISPR nuclease/gRNA pair of SEQ ID NO:33/SEQ ID NO: 173; the CRISPR nuclease/gRNA pair of SEQ ID NO:34/SEQ ID NO: 150 or the CRISPR nuclease/gRNA pair of SEQ ID NO:34/SEQ ID NO: 174; the CRISPR nuclease/gRNA pair of SEQ ID NO:35/SEQ ID NO: 151 or the CRISPR nuclease/gRNA pair of SEQ ID NO:35/SEQ ID NO: 175; the CRISPR nuclease/gRNA pair of SEQ ID NO:36/SEQ ID NO: 152 or the CRISPR nuclease/gRNA pair of SEQ ID NO:36/SEQ ID NO: 176; the CRISPR nuclease/gRNA pair of SEQ ID NO:37/SEQ ID NO: 153 or the CRISPR nuclease/gRNA pair of SEQ ID NO:37/SEQ ID NO: 177; the CRISPR nuclease/gRNA pair of SEQ ID NO:38/SEQ ID NO: 154 or the CRISPR nuclease/gRNA pair of SEQ ID NO:38/SEQ ID NO: 178; the CRISPR nuclease/gRNA pair of SEQ ID NO:39/SEQ ID NO: 155 or the CRISPR nuclease/gRNA pair of SEQ ID NO:39/SEQ ID NO: 179; the CRISPR nuclease/gRNA pair of SEQ ID NO:40/SEQ ID NO: 156 or the CRISPR nuclease/gRNA pair of SEQ ID NO:40/SEQ ID NO: 180; the CRISPR nuclease/gRNA pair of SEQ ID NO:41/SEQ ID NO: 157 or the CRISPR nuclease/gRNA pair of SEQ ID NO:41/SEQ ID NO: 181; the CRISPR nuclease/gRNA pair of SEQ ID NO:42/SEQ ID NO: 158 or the CRISPR nuclease/gRNA pair of SEQ ID NO:42/SEQ ID NO: 182; the CRISPR nuclease/gRNA pair of SEQ ID NO:43/SEQ ID NO: 159 or the CRISPR nuclease/gRNA pair of SEQ ID NO:43/SEQ ID NO: 183; the CRISPR nuclease/gRNA pair of SEQ ID NO:44/SEQ ID NO: 160 or the CRISPR nuclease/gRNA pair of SEQ ID NO:44/SEQ ID NO: 184; the CRISPR nuclease/gRNA pair of SEQ ID NO:45/SEQ ID NO: 161 or the CRISPR nuclease/gRNA pair of SEQ ID NO:45/SEQ ID NO: 185; the CRISPR nuclease/gRNA pair of SEQ ID NO:46/SEQ ID NO: 162 or the CRISPR nuclease/gRNA pair of SEQ ID NO:46/SEQ ID NO: 186; the CRISPR nuclease/gRNA pair of SEQ ID NO:47/SEQ ID NO: 163 or the CRISPR nuclease/gRNA pair of SEQ ID NO:47/SEQ ID NO: 187; the CRISPR nuclease/gRNA pair of SEQ ID NO:48/SEQ ID NO: 188 or the CRISPR nuclease/gRNA pair of SEQ ID NO:48/SEQ ID NO: 234; the CRISPR nuclease/gRNA pair of SEQ ID NO:49/SEQ ID NO: 189 or the CRISPR nuclease/gRNA pair of SEQ ID NO:49/SEQ ID NO: 235; the CRISPR nuclease/gRNA pair of SEQ ID NO:50/SEQ ID NO: 190 or the CRISPR nuclease/gRNA pair of SEQ ID NO:50/SEQ ID NO: 236; the CRISPR nuclease/gRNA pair of SEQ ID NO:51/SEQ ID NO: 191 or the CRISPR nuclease/gRNA pair of SEQ ID NO:51/SEQ ID NO: 237; the CRISPR nuclease/gRNA pair of SEQ ID NO:52/SEQ ID NO: 192 or the CRISPR nuclease/gRNA pair of SEQ ID NO:52/SEQ ID NO: 238; the CRISPR nuclease/gRNA pair of SEQ ID NO:53/SEQ ID NO: 193 or the CRISPR nuclease/gRNA pair of SEQ ID NO:53/SEQ ID NO: 239; the CRISPR nuclease/gRNA pair of SEQ ID NO:54/SEQ ID NO: 194 or the CRISPR nuclease/gRNA pair of SEQ ID NO:54/SEQ ID NO: 240; the CRISPR nuclease/gRNA pair of SEQ ID NO:55/SEQ ID NO: 195 or the CRISPR nuclease/gRNA pair of SEQ ID NO:55/SEQ ID NO: 241; the CRISPR nuclease/gRNA pair of SEQ ID NO:56/SEQ ID NO: 196 or the CRISPR nuclease/gRNA pair of SEQ ID NO:56/SEQ ID NO: 242; the CRISPR nuclease/gRNA pair of SEQ ID NO:57/SEQ ID NO: 197 or the CRISPR nuclease/gRNA pair of SEQ ID NO:57/SEQ ID NO: 243; the CRISPR nuclease/gRNA pair of SEQ ID NO:58/SEQ ID NO: 198 or the CRISPR nuclease/gRNA pair of SEQ ID NO:58/SEQ ID NO: 244; the CRISPR nuclease/gRNA pair of SEQ ID NO:59/SEQ ID NO: 199 or the CRISPR nuclease/gRNA pair of SEQ ID NO:59/SEQ ID NO: 245; the CRISPR nuclease/gRNA pair of SEQ ID NO:60/SEQ ID NO: 200 or the CRISPR nuclease/gRNA pair of SEQ ID NO:60/SEQ ID NO: 246; the CRISPR nuclease/gRNA pair of SEQ ID NO:61/SEQ ID NO: 201 or the CRISPR nuclease/gRNA pair of SEQ ID NO:61/SEQ ID NO: 247; the CRISPR nuclease/gRNA pair of SEQ ID NO:62/SEQ ID NO: 202 or the CRISPR nuclease/gRNA pair of SEQ ID NO:62/SEQ ID NO: 248; the CRISPR nuclease/gRNA pair of SEQ ID NO:63/SEQ ID NO: 203 or the CRISPR nuclease/gRNA pair of SEQ ID NO:63/SEQ ID NO: 249; the CRISPR nuclease/gRNA pair of SEQ ID NO:64/SEQ ID NO: 204 or the CRISPR nuclease/gRNA pair of SEQ ID NO:64/SEQ ID NO: 250; the CRISPR nuclease/gRNA pair of SEQ ID NO:65/SEQ ID NO: 205 or the CRISPR nuclease/gRNA pair of SEQ ID NO:65/SEQ ID NO: 251; the CRISPR nuclease/gRNA pair of SEQ ID NO:66/SEQ ID NO: 206 or the CRISPR nuclease/gRNA pair of SEQ ID NO:66/SEQ ID NO: 252; the CRISPR nuclease/gRNA pair of SEQ ID NO:67/SEQ ID NO: 207 or the CRISPR nuclease/gRNA pair of SEQ ID NO:67/SEQ ID NO: 253; the CRISPR nuclease/gRNA pair of SEQ ID NO:68/SEQ ID NO: 208 or the CRISPR nuclease/gRNA pair of SEQ ID NO:68/SEQ ID NO: 254; the CRISPR nuclease/gRNA pair of SEQ ID NO:69/SEQ ID NO: 209 or the CRISPR nuclease/gRNA pair of SEQ ID NO:69/SEQ ID NO: 255; the CRISPR nuclease/gRNA pair of SEQ ID NO:70/SEQ ID NO: 210 or the CRISPR nuclease/gRNA pair of SEQ ID NO:70/SEQ ID NO: 256; the CRISPR nuclease/gRNA pair of SEQ ID NO:71/SEQ ID NO: 211 or the CRISPR nuclease/gRNA pair of SEQ ID NO:71/SEQ ID NO: 257; the CRISPR nuclease/gRNA pair of SEQ ID NO:72/SEQ ID NO: 212 or the CRISPR nuclease/gRNA pair of SEQ ID NO:72/SEQ ID NO: 258; the CRISPR nuclease/gRNA pair of SEQ ID NO:73/SEQ ID NO: 213 or the CRISPR nuclease/gRNA pair of SEQ ID NO:73/SEQ ID NO: 259; the CRISPR nuclease/gRNA pair of SEQ ID NO:74/SEQ ID NO: 214 or the CRISPR nuclease/gRNA pair of SEQ ID NO:74/SEQ ID NO: 260; the CRISPR nuclease/gRNA pair of SEQ ID NO:75/SEQ ID NO: 215 or the CRISPR nuclease/gRNA pair of SEQ ID NO:75/SEQ ID NO: 261; the CRISPR nuclease/gRNA pair of SEQ ID NO:76/SEQ ID NO: 216 or the CRISPR nuclease/gRNA pair of SEQ ID NO:76/SEQ ID NO: 262; the CRISPR nuclease/gRNA pair of SEQ ID NO:77/SEQ ID NO: 217 or the CRISPR nuclease/gRNA pair of SEQ ID NO:77/SEQ ID NO: 263; the CRISPR nuclease/gRNA pair of SEQ ID NO:78/SEQ ID NO: 218 or the CRISPR nuclease/gRNA pair of SEQ ID NO:78/SEQ ID NO: 264; the CRISPR nuclease/gRNA pair of SEQ ID NO:79/SEQ ID NO: 219 or the CRISPR nuclease/gRNA pair of SEQ ID NO:79/SEQ ID NO: 265; the CRISPR nuclease/gRNA pair of SEQ ID NO:80/SEQ ID NO: 220 or the CRISPR nuclease/gRNA pair of SEQ ID NO:80/SEQ ID NO: 266; the CRISPR nuclease/gRNA pair of SEQ ID NO:81/SEQ ID NO: 221 or the CRISPR nuclease/gRNA pair of SEQ ID NO:81/SEQ ID NO: 267; the CRISPR nuclease/gRNA pair of SEQ ID NO:82/SEQ ID NO: 222 or the CRISPR nuclease/gRNA pair of SEQ ID NO:82/SEQ ID NO: 268; the CRISPR nuclease/gRNA pair of SEQ ID NO:83/SEQ ID NO: 223 or the CRISPR nuclease/gRNA pair of SEQ ID NO:83/SEQ ID NO: 269; the CRISPR nuclease/gRNA pair of SEQ ID NO:84/SEQ ID NO: 224 or the CRISPR nuclease/gRNA pair of SEQ ID NO:84/SEQ ID NO: 270; the CRISPR nuclease/gRNA pair of SEQ ID NO:85/SEQ ID NO: 225 or the CRISPR nuclease/gRNA pair of SEQ ID NO:85/SEQ ID NO: 271; the CRISPR nuclease/gRNA pair of SEQ ID NO:86/SEQ ID NO: 226 or the CRISPR nuclease/gRNA pair of SEQ ID NO:86/SEQ ID NO: 272; the CRISPR nuclease/gRNA pair of SEQ ID NO:87/SEQ ID NO: 227 or the CRISPR nuclease/gRNA pair of SEQ ID NO:87/SEQ ID NO: 273; the CRISPR nuclease/gRNA pair of SEQ ID NO:88/SEQ ID NO: 228 or the CRISPR nuclease/gRNA pair of SEQ ID NO:88/SEQ ID NO: 274; the CRISPR nuclease/gRNA pair of SEQ ID NO:89/SEQ ID NO: 229 or the CRISPR nuclease/gRNA pair of SEQ ID NO:89/SEQ ID NO: 275; the CRISPR nuclease/gRNA pair of SEQ ID NO:90/SEQ ID NO: 230 or the CRISPR nuclease/gRNA pair of SEQ ID NO:90/SEQ ID NO: 276; the CRISPR nuclease/gRNA pair of SEQ ID NO:91/SEQ ID NO: 231 or the CRISPR nuclease/gRNA pair of SEQ ID NO:91/SEQ ID NO: 277; the CRISPR nuclease/gRNA pair of SEQ ID NO:92/SEQ ID NO: 232 or the CRISPR nuclease/gRNA pair of SEQ ID NO:92/SEQ ID NO: 278; the CRISPR nuclease/gRNA pair of SEQ ID NO:93/SEQ ID NO: 233 and/or the CRISPR nuclease/gRNA pair of SEQ ID NO:93/SEQ ID NO: 279; the CRISPR nuclease/gRNA pair is SEQ ID NO:22/SEQ ID NO: 115 or the CRISPR nuclease/gRNA pair of SEQ ID NO:22/SEQ ID NO: 138.

[0076] Embodiment 6. The reaction mixture of any one of Embodiments 1-5, wherein at least one nucleic acid-guided CRISPR nuclease has trans-cleavage activity.

[0077] Embodiment 7. The reaction mixture of any one of Embodiments 1-6, wherein at least one nucleic acid-guided CRISPR nuclease hybridizes to a PAM region in a target nucleic acid sequence.

[0078] Embodiment 8. The reaction mixture of any one of Embodiments 1-7, wherein the substrate is a ribonucleic acid molecule (RNA) complexed with a fluorophore and a quencher for the fluorophore.

[0079] Embodiment 9. The reaction mixture of any one of Embodiments 1-8, wherein the reaction mixture is in solution, and wherein the substrate is present in the reaction mix in a concentration ranging from 250 nM to 450 nM.

[0080] Embodiment 10. The reaction mixture of any one of Embodiments 1-9, wherein the substrate is a ribonucleic acid molecule (RNA) complexed with biotin.

[0081] Embodiment 11. The reaction mixture of any one of Embodiments 1-9, wherein the substrate is a deoxyribonucleic acid (DNA) complexed with a fluorophore and a quencher for the fluorophore.

[0082] Embodiment 12. The reaction mixture of any one of Embodiments 1-11, wherein the reaction mixture further comprises a target nucleic acid sequence.

[0083] Embodiment 13. The reaction mixture of any one of Embodiments 1-12, wherein the target nucleic acid sequence is a sequence from an influenza A virus, an influenza B virus, a Respiratory Syncytial Virus (RSV), or a SARS-CoV-2 virus.

[0084] Embodiment 14. The reaction mixture of any one of Embodiments 1-13, wherein the target nucleic acid sequence is from an influenza A virus.

[0085] Embodiment 15. The reaction mixture of any one of Embodiments 1-14, wherein the target nucleic acid sequence is SEQ ID NO:373.

[0086] Embodiment 16. The reaction mixture of any one of Embodiments 1-15, wherein the target nucleic acid sequence activates cleavage of the substrate by the nucleic acid-guided CRISPR nuclease.

[0087] Embodiment 17. The reaction mixture of any one of Embodiments 1-16, wherein the reaction mixture is in solution, and wherein the nucleic acid-guided CRISPR nuclease cleaves the substrate with a sensitivity of at least 25 nM.

[0088] Embodiment 18. The reaction mixture of any one of Embodiments 1-17, wherein the nucleic acid-guided CRISPR nuclease is present in the reaction mix in a concentration ranging from 10 ng/uL to 100 ng/uL.

[0089] Embodiment 19. The reaction mixture of any one of Embodiments 1-18, wherein the guide nucleic acid (gRNA) is present in the reaction mix in a concentration ranging from 20 nM to 180 nM.

[0090] Embodiment 20. The reaction mixture of any one of Embodiments 1-19, wherein the guide nucleic acid (gRNA) is from 40 to 65 nucleotides in length.

[0091] Embodiment 21. The reaction mixture of any one of Embodiments 1-20, wherein the reaction mixture further comprises an RNase inhibitor and MgCl₂.

[0092] Embodiment 22. The reaction mixture of any one of Embodiments 1-21, wherein the reaction mixture further comprises another gRNA.

[0093] Embodiment 23. The reaction mixture of any one of Embodiments 1-22, wherein the complex comprises the CRISPR nuclease/direct repeat pair of SEQ ID NO:22/SEQ ID NO: 395, the CRISPR nuclease/direct repeat pair of SEQ ID NO:62/SEQ ID NO: 435, the CRISPR nuclease/direct repeat pair of SEQ ID NO:80/SEQ ID NO: 453, and/or CRISPR nuclease/direct repeat pair of SEQ ID NO:91/SEQ ID NO: 464.

[0094] Embodiment 24. An expression vector encoding a nucleic acid-guided CRISPR nuclease having at least 85% amino acid homology to any one of SEQ ID NOs:1-93, wherein the expression vector includes a heterologous promoter.

[0095] Embodiment 25. The expression vector of Embodiment 24, wherein the heterologous promoter is a T7 promoter.

[0096] Embodiment 26. The expression vector of any one of Embodiments 24 or 25, wherein the expression vector further comprises a purification tag.

[0097] Embodiment 27. The expression vector of any one of Embodiments 24-26, wherein the purification tag is a 6-his tag.

[0098] Embodiment 28. The expression vector of Embodiment 27, wherein the purification tag is on an N-terminus of the nucleic acid-guided CRISPR nuclease.

[0099] Embodiment 29. The expression vector of any one of Embodiments 24-28, wherein the purification tag is on a C-terminus of the nucleic acid-guided CRISPR nuclease.

[0100] Embodiment 30. The expression vector of any one of Embodiments 24-29, wherein the purification tag is cleavable.

[0101] Embodiment 31. The expression vector of any one of Embodiments 24-30, wherein the nucleic acid-guided CRISPR nuclease has at least 90% amino acid homology to any one of SEQ ID NOs:1-93.

[0102] Embodiment 32. The expression vector of any one of Embodiments 24-31, wherein the nucleic acid-guided CRISPR nuclease has at least 95% amino acid homology to any one of SEQ ID NOs:1-93.

[0103] Embodiment 33. The expression vector of any one of Embodiments 24-32, wherein the nucleic acid-guided CRISPR nuclease has at least 99% amino acid homology to any one of SEQ ID NOs:1-93.

[0104] Embodiment 34. The expression vector of any one of Embodiments 24-33, wherein the nucleic acid-guided CRISPR nuclease is selected from the group consisting of SEQ ID NO:22, SEQ ID NO:62, SEQ ID NO:80, and SEQ ID NO:91.

[0105] Embodiment 35. A recombinant nucleic acid-guided CRISPR nuclease produced from a cell-free expression system from an expression vector of any one of Embodiments 24-34.

[0106] Embodiment 36. The recombinant nucleic acid-guided CRISPR nuclease of Embodiment 35, wherein the recombinant nucleic acid-guided CRISPR nuclease has trans-cleavage activity.

[0107] Embodiment 37. The recombinant nucleic acid-guided CRISPR nuclease of Embodiment 36, wherein the recombinant nucleic acid-guided CRISPR nuclease cleaves a single stranded deoxyribonucleic acid (DNA) molecule.

[0108] Embodiment 38. The recombinant nucleic acid-guided CRISPR nuclease of Embodiment 36, wherein the recombinant nucleic acid-guided CRISPR nuclease cleaves a double stranded deoxyribonucleic acid (DNA) molecule.

[0109] Embodiment 39. The recombinant nucleic acid-guided CRISPR nuclease of any one of Embodiments 36-38, wherein the recombinant nucleic acid-guided CRISPR nuclease cleaves a ribonucleic acid (RNA) molecule.

[0110] Embodiment 40. The recombinant nucleic acid-guided CRISPR nuclease of any one of Embodiments 36-38, wherein the recombinant nucleic acid-guided CRISPR nuclease exhibits at least 25% higher cleavage activity as compared to LwaCas13a when cleaving SEQ ID NO: 180.

[0111] Embodiment 41. The recombinant nucleic acid-guided CRISPR nuclease of any one of Embodiments 36-40, the recombinant nucleic acid-guided CRISPR nuclease comprises SEQ ID NO:22, SEQ ID NO:62, or SEQ ID NO:80.

[0112] Embodiment 42. The recombinant nucleic acid-guided CRISPR nuclease of any one of Embodiments 36-41, wherein the recombinant nucleic acid-guided CRISPR nuclease has an apparent weight of 90 kDa to 170 kDa when produced from an in-vitro translation system.

[0113] Embodiment 43. A nucleic acid sequence having a first portion at least 95% identical to any one of SEQ ID NOs:280-372, wherein the nucleic acid sequence encodes a nucleic acid-guided CRISPR nuclease comprising an amino acid sequence of any one of SEQ ID NOs:1-93 or comprising an amino acid sequence at least 95% identical to any one of SEQ ID Nos:1-93 and, optionally, at least one nucleic acid sequence configured to facilitate the recombinant expression of the nucleic acid-guided CRISPR nuclease in an organism.

[0114] Embodiment 44. The nucleic acid of Embodiment 43, wherein the nucleic acid-guided CRISPR nuclease is recombinantly expressed in an organism.

[0115] Embodiment 45. A nucleic acid sequence, wherein the nucleic acid sequence comprises a nucleic acid of any one of Embodiments 43 and 44, that has been codon optimized for expression in E. coli.

[0116] Embodiment 46. An enzyme system comprising: a nucleic acid-guided CRISPR nuclease having at least 85% amino acid homology to any one of SEQ ID NOs:1-93; and a guide nucleic acid (gRNA) for complexing with the nucleic acid-guided CRISPR nuclease, wherein the gRNA comprises a nucleic acid sequence, e.g., a gRNA sequence, wherein the nucleic acid sequence comprises (i) a direct repeat sequence having at least 68%, at least 85%, at least 90%, or at least 95% homology to any one of SEQ ID Nos: 374-466, and optionally, (ii) at least 85% homology to any one of SEQ ID NOs:94-279.

[0117] Embodiment 47. An enzyme system comprising: a nucleic acid-guided CRISPR nuclease having at least 85% amino acid homology to any one of SEQ ID NOs:1-93; and a guide nucleic acid (gRNA) for complexing with the nucleic acid-guided CRISPR nuclease, wherein the gRNA comprises a nucleic acid sequence, e.g., a gRNA sequence, wherein the nucleic acid sequence comprises (i) a direct repeat sequence having at least 65%, at least 85%, at least 90%, or at least 95% homology to any one of SEQ ID Nos: 374-466, and optionally (ii) at least 65%, at least 85%, at least 90%, or at least 95% nucleic acid homology to any one of SEQ ID NOs:94-279.

[0118] Embodiment 48. The enzyme system of any one of Embodiment 46 or Embodiment 47, wherein the nucleic acid-guided CRISPR nuclease has at least 90% amino acid homology to any one of SEQ ID NOs:1-93.

[0119] Embodiment 49. The enzyme system of any one of Embodiment 46-48, whereby the nucleic acid-guided CRISPR nuclease has at least 95% or at least 99% amino acid homology to any one of SEQ ID NOs:1-93.

[0120] Embodiment 50. The enzyme system of any one of Embodiment 46-49, whereby the nucleic acid system comprises a CRISPR nuclease that complexes with a guide nucleic acid comprising a direct repeat sequence, thereby forming one or more CRISPR nuclease/direct repeat pair complexes selected from the CRISPR nuclease/direct repeat pairs of SEQ ID NO:1/SEQ ID NO: 374 (JW13101); the CRISPR nuclease/direct repeat pair of SEQ ID NO:2/SEQ ID NO: 375 (JW13102); the CRISPR nuclease/direct repeat pair of SEQ ID NO:3/SEQ ID NO: 376 (JW13103); the CRISPR nuclease/direct repeat pair of SEQ ID NO:4/SEQ ID NO: 377 (JW13104); the CRISPR nuclease/direct repeat pair of SEQ ID NO:5/SEQ ID NO: 378 (JW13105); the CRISPR nuclease/direct repeat pair of SEQ ID NO:6/SEQ ID NO: 379 (JW13106); the CRISPR nuclease/direct repeat pair of SEQ ID NO:7/SEQ ID NO: 380 (JW13107); the CRISPR nuclease/direct repeat pair of SEQ ID NO:8/SEQ ID NO: 381 (JW13108); the CRISPR nuclease/direct repeat pair of SEQ ID NO:9/SEQ ID NO: 382 (JW13110); the CRISPR nuclease/direct repeat pair of SEQ ID NO: 10/SEQ ID NO: 383 (JW13112); the CRISPR nuclease/direct repeat pair of SEQ ID NO: 11/SEQ ID NO: 384 (JW13113); the CRISPR nuclease/direct repeat pair of SEQ ID NO: 12/SEQ ID NO: 385 (JW13114); the CRISPR nuclease/direct repeat pair of SEQ ID NO: 13/SEQ ID NO: 386 (JW13115); the CRISPR nuclease/direct repeat pair of SEQ ID NO: 14/SEQ ID NO: 387 (JW13116); the CRISPR nuclease/direct repeat pair of SEQ ID NO: 15/SEQ ID NO: 388 (JW13117); the CRISPR nuclease/direct repeat pair of SEQ ID NO:16/SEQ ID NO: 389 (JW13118); the CRISPR nuclease/direct repeat pair of SEQ ID NO: 17/SEQ ID NO: 390 (JW13119); the CRISPR nuclease/direct repeat pair of SEQ ID NO: 18/SEQ ID NO: 391 (JW13120); the CRISPR nuclease/direct repeat pair of SEQ ID NO: 19/SEQ ID NO: 392 (JW13121); the CRISPR nuclease/direct repeat pair of SEQ ID NO:20/SEQ ID NO: 393 (JW13122); the CRISPR nuclease/direct repeat pair of SEQ ID NO:21/SEQ ID NO: 394 (JW13123); the CRISPR nuclease/direct repeat pair of SEQ ID NO:22/SEQ ID NO: 395 (JW13124); the CRISPR nuclease/direct repeat pair of SEQ ID NO:23/SEQ ID NO: 396 (JW13125); the CRISPR nuclease/direct repeat pair of SEQ ID NO:24/SEQ ID NO: 397 (JW13126); the CRISPR nuclease/direct repeat pair of SEQ ID NO:25/SEQ ID NO: 398 (JW13127); the CRISPR nuclease/direct repeat pair of SEQ ID NO:26/SEQ ID NO: 399 (JW13128); the CRISPR nuclease/direct repeat pair of SEQ ID NO:27/SEQ ID NO: 400 (JW13129); the CRISPR nuclease/direct repeat pair of SEQ ID NO:28/SEQ ID NO: 401 (JW13130); the CRISPR nuclease/direct repeat pair of SEQ ID NO:29/SEQ ID NO: 402 (JW13131); the CRISPR nuclease/direct repeat pair of SEQ ID NO:30/SEQ ID NO: 403 (JW13132); the CRISPR nuclease/direct repeat pair of SEQ ID NO:31/SEQ ID NO: 404 (JW13133); the CRISPR nuclease/direct repeat pair of SEQ ID NO:32/SEQ ID NO: 405 (JW13134); the CRISPR nuclease/direct repeat pair of SEQ ID NO:33/SEQ ID NO: 406 (JW13135); the CRISPR nuclease/direct repeat pair of SEQ ID NO:34/SEQ ID NO: 407 (JW13136); the CRISPR nuclease/direct repeat pair of SEQ ID NO:35/SEQ ID NO: 408 (JW13137); the CRISPR nuclease/direct repeat pair of SEQ ID NO:36/SEQ ID NO: 409 (JW13138); the CRISPR nuclease/direct repeat pair of SEQ ID NO:37/SEQ ID NO: 410 (JW13139); the CRISPR nuclease/direct repeat pair of SEQ ID NO:38/SEQ ID NO: 411 (JW13140); the CRISPR nuclease/direct repeat pair of SEQ ID NO:39/SEQ ID NO: 412 (JW13141); the CRISPR nuclease/direct repeat pair of SEQ ID NO:40/SEQ ID NO: 413 (JW13142); the CRISPR nuclease/direct repeat pair of SEQ ID NO:41/SEQ ID NO: 414 (JW13143); the CRISPR nuclease/direct repeat pair of SEQ ID NO:42/SEQ ID NO: 415 (JW13144); the CRISPR nuclease/direct repeat pair of SEQ ID NO:43/SEQ ID NO: 416 (JW13145); the CRISPR nuclease/direct repeat pair of SEQ ID NO:44/SEQ ID NO: 417 (JW13146); the CRISPR nuclease/direct repeat pair of SEQ ID NO:45/SEQ ID NO: 418 (JW13147); the CRISPR nuclease/direct repeat pair of SEQ ID NO:46/SEQ ID NO: 419 (JW13148); the CRISPR nuclease/direct repeat pair of SEQ ID NO:47/SEQ ID NO: 420 (JW13149); the CRISPR nuclease/direct repeat pair of SEQ ID NO:48/SEQ ID NO: 421 (JW13150); the CRISPR nuclease/direct repeat pair of SEQ ID NO:49/SEQ ID NO: 422 (JW13153); the CRISPR nuclease/direct repeat pair of SEQ ID NO:50/SEQ ID NO: 423 (JW13154); the CRISPR nuclease/direct repeat pair of SEQ ID NO:51/SEQ ID NO: 424 (JW13155); the CRISPR nuclease/direct repeat pair of SEQ ID NO:52/SEQ ID NO: 425 (JW13156); the CRISPR nuclease/direct repeat pair of SEQ ID NO:53/SEQ ID NO: 426 (JW13157); the CRISPR nuclease/direct repeat pair of SEQ ID NO:54/SEQ ID NO: 427 (JW13158); the CRISPR nuclease/direct repeat pair of SEQ ID NO:55/SEQ ID NO: 428 (JW13159); the CRISPR nuclease/direct repeat pair of SEQ ID NO:56/SEQ ID NO: 429 (JW13160); the CRISPR nuclease/direct repeat pair of SEQ ID NO:57/SEQ ID NO: 430 (JW13161); the CRISPR nuclease/direct repeat pair of SEQ ID NO:58/SEQ ID NO: 431 (JW13162); the CRISPR nuclease/direct repeat pair of SEQ ID NO:59/SEQ ID NO: 432 (JW13163); the CRISPR nuclease/direct repeat pair of SEQ ID NO: 60/SEQ ID NO: 433 (JW13164); the CRISPR nuclease/direct repeat pair of SEQ ID NO:61/SEQ ID NO: 434 (JW13165); the CRISPR nuclease/direct repeat pair of SEQ ID NO:62/SEQ ID NO: 435 (JW13166); the CRISPR nuclease/direct repeat pair of SEQ ID NO:63/SEQ ID NO: 436 (JW13167); the CRISPR nuclease/direct repeat pair of SEQ ID NO:64/SEQ ID NO: 437 (JW13168); the CRISPR nuclease/direct repeat pair of SEQ ID NO:65/SEQ ID NO: 438 (JW13169); the CRISPR nuclease/direct repeat pair of SEQ ID NO:66/SEQ ID NO: 439 (JW13170); the CRISPR nuclease/direct repeat pair of SEQ ID NO:67/SEQ ID NO: 440 (JW13171); the CRISPR nuclease/direct repeat pair of SEQ ID NO:68/SEQ ID NO: 441 (JW13172); the CRISPR nuclease/direct repeat pair of SEQ ID NO:69/SEQ ID NO: 442 (JW13173); the CRISPR nuclease/direct repeat pair of SEQ ID NO:70/SEQ ID NO: 443 (JW13174); the CRISPR nuclease/direct repeat pair of SEQ ID NO:71/SEQ ID NO: 444 (JW13175); the CRISPR nuclease/direct repeat pair of SEQ ID NO:72/SEQ ID NO: 445 (JW13176); the CRISPR nuclease/direct repeat pair of SEQ ID NO:73/SEQ ID NO: 446 (JW13177); the CRISPR nuclease/direct repeat pair of SEQ ID NO:74/SEQ ID NO: 447 (JW13178); the CRISPR nuclease/direct repeat pair of SEQ ID NO:75/SEQ ID NO: 448 (JW13179); the CRISPR nuclease/direct repeat pair of SEQ ID NO: 76/SEQ ID NO: 449 (JW13180); the CRISPR nuclease/direct repeat pair of SEQ ID NO:77/SEQ ID NO: 450 (JW13181); the CRISPR nuclease/direct repeat pair of SEQ ID NO:78/SEQ ID NO: 451 (JW13182); the CRISPR nuclease/direct repeat pair of SEQ ID NO:79/SEQ ID NO: 452 (JW13183); the CRISPR nuclease/direct repeat pair of SEQ ID NO:80/SEQ ID NO: 453 (JW13184); the CRISPR nuclease/direct repeat pair of SEQ ID NO:81/SEQ ID NO: 454 (JW13185); the CRISPR nuclease/direct repeat pair of SEQ ID NO:82/SEQ ID NO: 455 (JW13186); the CRISPR nuclease/direct repeat pair of SEQ ID NO:83/SEQ ID NO: 456 (JW13187); the CRISPR nuclease/direct repeat pair of SEQ ID NO:84/SEQ ID NO: 457 (JW13188); the CRISPR nuclease/direct repeat pair of SEQ ID NO:85/SEQ ID NO: 458 (JW13189); the CRISPR nuclease/direct repeat pair of SEQ ID NO:86/SEQ ID NO: 459 (JW13190); the CRISPR nuclease/direct repeat pair of SEQ ID NO:87/SEQ ID NO: 460 (JW13191); the CRISPR nuclease/direct repeat pair of SEQ ID NO:88/SEQ ID NO: 461 (JW13192); the CRISPR nuclease/direct repeat pair of SEQ ID NO:89/SEQ ID NO: 462 (JW13193); the CRISPR nuclease/direct repeat pair of SEQ ID NO:90/SEQ ID NO: 463 (JW13194); the CRISPR nuclease/direct repeat pair of SEQ ID NO:91/SEQ ID NO: 464 (JW13195); the CRISPR nuclease/direct repeat pair of SEQ ID NO:92/SEQ ID NO: 465 (JW13196); and/or the CRISPR nuclease/direct repeat pair of SEQ ID NO:93/SEQ ID NO: 466 (JW13197).

[0121] Embodiment 51. The enzyme system of any one of Embodiment 46-50, whereby the nucleic acid-guided CRISPR nuclease and the guide nucleic acid comprise a CRISPR nuclease/gRNA pair selected from the group consisting of: the CRISPR nuclease/gRNA pair of SEQ ID NO:1/SEQ ID NO: 94 or the CRISPR nuclease/gRNA pair of SEQ ID NO:1/SEQ ID NO: 117; the CRISPR nuclease/gRNA pair of SEQ ID NO:2/SEQ ID NO: 95 or the CRISPR nuclease/gRNA pair of SEQ ID NO:2/SEQ ID NO: 118; the CRISPR nuclease/gRNA pair of SEQ ID NO:3/SEQ ID NO: 96 or the CRISPR nuclease/gRNA pair of SEQ ID NO:3/SEQ ID NO: 119; the CRISPR nuclease/gRNA pair of SEQ ID NO:4/SEQ ID NO: 97 or the CRISPR nuclease/gRNA pair of SEQ ID NO:4/SEQ ID NO: 120; the CRISPR nuclease/gRNA pair of SEQ ID NO:5/SEQ ID NO: 98 or the CRISPR nuclease/gRNA pair of SEQ ID NO:5/SEQ ID NO: 121; the CRISPR nuclease/gRNA pair of SEQ ID NO:6/SEQ ID NO: 99 or the CRISPR nuclease/gRNA pair of SEQ ID NO:6/SEQ ID NO: 122; the CRISPR nuclease/gRNA pair of SEQ ID NO:7/SEQ ID NO: 100 or the CRISPR nuclease/gRNA pair of SEQ ID NO:7/SEQ ID NO: 123; the CRISPR nuclease/gRNA pair of SEQ ID NO:8/SEQ ID NO: 101 or the CRISPR nuclease/gRNA pair of SEQ ID NO:8/SEQ ID NO: 124; the CRISPR nuclease/gRNA pair of SEQ ID NO:9/SEQ ID NO: 102 or the CRISPR nuclease/gRNA pair of SEQ ID NO:9/SEQ ID NO: 125; the CRISPR nuclease/gRNA pair of SEQ ID NO: 10/SEQ ID NO: 103 or the CRISPR nuclease/gRNA pair of SEQ ID NO: 10/SEQ ID NO: 126; the CRISPR nuclease/gRNA pair of SEQ ID NO: 11/SEQ ID NO: 104 or the CRISPR nuclease/gRNA pair of SEQ ID NO:11/SEQ ID NO: 127; the CRISPR nuclease/gRNA pair of SEQ ID NO: 12/SEQ ID NO: 105 or the CRISPR nuclease/gRNA pair of SEQ ID NO: 12/SEQ ID NO: 128; the CRISPR nuclease/gRNA pair of SEQ ID NO: 13/SEQ ID NO: 106 or the CRISPR nuclease/gRNA pair of SEQ ID NO:13/SEQ ID NO: 129; the CRISPR nuclease/gRNA pair of SEQ ID NO:14/SEQ ID NO: 107 or the CRISPR nuclease/gRNA pair of SEQ ID NO: 14/SEQ ID NO: 130; the CRISPR nuclease/gRNA pair of SEQ ID NO: 15/SEQ ID NO: 108 or the CRISPR nuclease/gRNA pair of SEQ ID NO: 15/SEQ ID NO: 131; the CRISPR nuclease/gRNA pair of SEQ ID NO: 16/SEQ ID NO: 109 or the CRISPR nuclease/gRNA pair of SEQ ID NO: 16/SEQ ID NO: 132; the CRISPR nuclease/gRNA pair of SEQ ID NO: 17/SEQ ID NO: 110 or the CRISPR nuclease/gRNA pair of SEQ ID NO: 17/SEQ ID NO: 133; the CRISPR nuclease/gRNA pair of SEQ ID NO:18/SEQ ID NO: 111 or the CRISPR nuclease/gRNA pair of SEQ ID NO:18/SEQ ID NO: 134; the CRISPR nuclease/gRNA pair of SEQ ID NO: 19/SEQ ID NO: 112 or the CRISPR nuclease/gRNA pair of SEQ ID NO: 19/SEQ ID NO: 135; the CRISPR nuclease/gRNA pair of SEQ ID NO:20/SEQ ID NO: 113 or the CRISPR nuclease/gRNA pair of SEQ ID NO:20/SEQ ID NO: 136; the CRISPR nuclease/gRNA pair of SEQ ID NO:21/SEQ ID NO: 114 or the CRISPR nuclease/gRNA pair of SEQ ID NO:21/SEQ ID NO: 137; the CRISPR nuclease/gRNA pair of SEQ ID NO:22/SEQ ID NO: 115 or the CRISPR nuclease/gRNA pair of SEQ ID NO:22/SEQ ID NO: 138; the CRISPR nuclease/gRNA pair of SEQ ID NO:23/SEQ ID NO: 116 or the CRISPR nuclease/gRNA pair of SEQ ID NO:23/SEQ ID NO: 139; the CRISPR nuclease/gRNA pair of SEQ ID NO:24/SEQ ID NO: 140 or the CRISPR nuclease/gRNA pair of SEQ ID NO:24/SEQ ID NO: 164; the CRISPR nuclease/gRNA pair of SEQ ID NO:25/SEQ ID NO: 141 or the CRISPR nuclease/gRNA pair of SEQ ID NO:25/SEQ ID NO: 165; the CRISPR nuclease/gRNA pair of SEQ ID NO:26/SEQ ID NO: 142 or the CRISPR nuclease/gRNA pair of SEQ ID NO:26/SEQ ID NO: 166; the CRISPR nuclease/gRNA pair of SEQ ID NO:27/SEQ ID NO: 143 or the CRISPR nuclease/gRNA pair of SEQ ID NO:27/SEQ ID NO: 167; the CRISPR nuclease/gRNA pair of SEQ ID NO:28/SEQ ID NO: 144 or the CRISPR nuclease/gRNA pair of SEQ ID NO:28/SEQ ID NO: 168; the CRISPR nuclease/gRNA pair of SEQ ID NO:29/SEQ ID NO: 145 or the CRISPR nuclease/gRNA pair of SEQ ID NO:29/SEQ ID NO: 169; the CRISPR nuclease/gRNA pair of SEQ ID NO:30/SEQ ID NO: 146 or the CRISPR nuclease/gRNA pair of SEQ ID NO:30/SEQ ID NO: 170; the CRISPR nuclease/gRNA pair of SEQ ID NO:31/SEQ ID NO: 147 or the CRISPR nuclease/gRNA pair of SEQ ID NO:31/SEQ ID NO: 171; the CRISPR nuclease/gRNA pair of SEQ ID NO:32/SEQ ID NO: 148 or the CRISPR nuclease/gRNA pair of SEQ ID NO:32/SEQ ID NO: 172; the CRISPR nuclease/gRNA pair of SEQ ID NO:33/SEQ ID NO: 149 or the CRISPR nuclease/gRNA pair of SEQ ID NO:33/SEQ ID NO: 173; the CRISPR nuclease/gRNA pair of SEQ ID NO:34/SEQ ID NO: 150 or the CRISPR nuclease/gRNA pair of SEQ ID NO:34/SEQ ID NO: 174; the CRISPR nuclease/gRNA pair of SEQ ID NO:35/SEQ ID NO: 151 or the CRISPR nuclease/gRNA pair of SEQ ID NO:35/SEQ ID NO: 175; the CRISPR nuclease/gRNA pair of SEQ ID NO:36/SEQ ID NO: 152 or the CRISPR nuclease/gRNA pair of SEQ ID NO:36/SEQ ID NO: 176; the CRISPR nuclease/gRNA pair of SEQ ID NO:37/SEQ ID NO: 153 or the CRISPR nuclease/gRNA pair of SEQ ID NO:37/SEQ ID NO: 177; the CRISPR nuclease/gRNA pair of SEQ ID NO:38/SEQ ID NO: 154 or the CRISPR nuclease/gRNA pair of SEQ ID NO:38/SEQ ID NO: 178; the CRISPR nuclease/gRNA pair of SEQ ID NO:39/SEQ ID NO: 155 or the CRISPR nuclease/gRNA pair of SEQ ID NO:39/SEQ ID NO: 179; the CRISPR nuclease/gRNA pair of SEQ ID NO:40/SEQ ID NO: 156 or the CRISPR nuclease/gRNA pair of SEQ ID NO:40/SEQ ID NO: 180; the CRISPR nuclease/gRNA pair of SEQ ID NO:41/SEQ ID NO: 157 or the CRISPR nuclease/gRNA pair of SEQ ID NO:41/SEQ ID NO: 181; the CRISPR nuclease/gRNA pair of SEQ ID NO:42/SEQ ID NO: 158 or the CRISPR nuclease/gRNA pair of SEQ ID NO:42/SEQ ID NO: 182; the CRISPR nuclease/gRNA pair of SEQ ID NO:43/SEQ ID NO: 159 or the CRISPR nuclease/gRNA pair of SEQ ID NO:43/SEQ ID NO: 183; the CRISPR nuclease/gRNA pair of SEQ ID NO:44/SEQ ID NO: 160 or the CRISPR nuclease/gRNA pair of SEQ ID NO:44/SEQ ID NO: 184; the CRISPR nuclease/gRNA pair of SEQ ID NO:45/SEQ ID NO: 161 or the CRISPR nuclease/gRNA pair of SEQ ID NO:45/SEQ ID NO: 185; the CRISPR nuclease/gRNA pair of SEQ ID NO:46/SEQ ID NO: 162 or the CRISPR nuclease/gRNA pair of SEQ ID NO:46/SEQ ID NO: 186; the CRISPR nuclease/gRNA pair of SEQ ID NO:47/SEQ ID NO: 163 or the CRISPR nuclease/gRNA pair of SEQ ID NO:47/SEQ ID NO: 187; the CRISPR nuclease/gRNA pair of SEQ ID NO:48/SEQ ID NO: 188 or the CRISPR nuclease/gRNA pair of SEQ ID NO:48/SEQ ID NO: 234; the CRISPR nuclease/gRNA pair of SEQ ID NO:49/SEQ ID NO: 189 or the CRISPR nuclease/gRNA pair of SEQ ID NO:49/SEQ ID NO: 235; the CRISPR nuclease/gRNA pair of SEQ ID NO:50/SEQ ID NO: 190 or the CRISPR nuclease/gRNA pair of SEQ ID NO:50/SEQ ID NO: 236; the CRISPR nuclease/gRNA pair of SEQ ID NO:51/SEQ ID NO: 191 or the CRISPR nuclease/gRNA pair of SEQ ID NO:51/SEQ ID NO: 237; the CRISPR nuclease/gRNA pair of SEQ ID NO:52/SEQ ID NO: 192 or the CRISPR nuclease/gRNA pair of SEQ ID NO:52/SEQ ID NO: 238; the CRISPR nuclease/gRNA pair of SEQ ID NO:53/SEQ ID NO: 193 or the CRISPR nuclease/gRNA pair of SEQ ID NO:53/SEQ ID NO: 239; the CRISPR nuclease/gRNA pair of SEQ ID NO:54/SEQ ID NO: 194 or the CRISPR nuclease/gRNA pair of SEQ ID NO:54/SEQ ID NO: 240; the CRISPR nuclease/gRNA pair of SEQ ID NO:55/SEQ ID NO: 195 or the CRISPR nuclease/gRNA pair of SEQ ID NO:55/SEQ ID NO: 241; the CRISPR nuclease/gRNA pair of SEQ ID NO:56/SEQ ID NO: 196 or the CRISPR nuclease/gRNA pair of SEQ ID NO:56/SEQ ID NO: 242; the CRISPR nuclease/gRNA pair of SEQ ID NO:57/SEQ ID NO: 197 or the CRISPR nuclease/gRNA pair of SEQ ID NO:57/SEQ ID NO: 243; the CRISPR nuclease/gRNA pair of SEQ ID NO:58/SEQ ID NO: 198 or the CRISPR nuclease/gRNA pair of SEQ ID NO:58/SEQ ID NO: 244; the CRISPR nuclease/gRNA pair of SEQ ID NO:59/SEQ ID NO: 199 or the CRISPR nuclease/gRNA pair of SEQ ID NO:59/SEQ ID NO: 245; the CRISPR nuclease/gRNA pair of SEQ ID NO:60/SEQ ID NO: 200 or the CRISPR nuclease/gRNA pair of SEQ ID NO:60/SEQ ID NO: 246; the CRISPR nuclease/gRNA pair of SEQ ID NO:61/SEQ ID NO: 201 or the CRISPR nuclease/gRNA pair of SEQ ID NO:61/SEQ ID NO: 247; the CRISPR nuclease/gRNA pair of SEQ ID NO:62/SEQ ID NO: 202 or the CRISPR nuclease/gRNA pair of SEQ ID NO:62/SEQ ID NO: 248; the CRISPR nuclease/gRNA pair of SEQ ID NO:63/SEQ ID NO: 203 or the CRISPR nuclease/gRNA pair of SEQ ID NO:63/SEQ ID NO: 249; the CRISPR nuclease/gRNA pair of SEQ ID NO:64/SEQ ID NO: 204 or the CRISPR nuclease/gRNA pair of SEQ ID NO:64/SEQ ID NO: 250; the CRISPR nuclease/gRNA pair of SEQ ID NO:65/SEQ ID NO: 205 or the CRISPR nuclease/gRNA pair of SEQ ID NO:65/SEQ ID NO: 251; the CRISPR nuclease/gRNA pair of SEQ ID NO:66/SEQ ID NO: 206 or the CRISPR nuclease/gRNA pair of SEQ ID NO:66/SEQ ID NO: 252; the CRISPR nuclease/gRNA pair of SEQ ID NO:67/SEQ ID NO: 207 or the CRISPR nuclease/gRNA pair of SEQ ID NO:67/SEQ ID NO: 253; the CRISPR nuclease/gRNA pair of SEQ ID NO:68/SEQ ID NO: 208 or the CRISPR nuclease/gRNA pair of SEQ ID NO:68/SEQ ID NO: 254; the CRISPR nuclease/gRNA pair of SEQ ID NO:69/SEQ ID NO: 209 or the CRISPR nuclease/gRNA pair of SEQ ID NO:69/SEQ ID NO: 255; the CRISPR nuclease/gRNA pair of SEQ ID NO:70/SEQ ID NO: 210 or the CRISPR nuclease/gRNA pair of SEQ ID NO:70/SEQ ID NO: 256; the CRISPR nuclease/gRNA pair of SEQ ID NO:71/SEQ ID NO: 211 or the CRISPR nuclease/gRNA pair of SEQ ID NO:71/SEQ ID NO: 257; the CRISPR nuclease/gRNA pair of SEQ ID NO:72/SEQ ID NO: 212 or the CRISPR nuclease/gRNA pair of SEQ ID NO:72/SEQ ID NO: 258; the CRISPR nuclease/gRNA pair of SEQ ID NO:73/SEQ ID NO: 213 or the CRISPR nuclease/gRNA pair of SEQ ID NO:73/SEQ ID NO: 259; the CRISPR nuclease/gRNA pair of SEQ ID NO:74/SEQ ID NO: 214 or the CRISPR nuclease/gRNA pair of SEQ ID NO:74/SEQ ID NO: 260; the CRISPR nuclease/gRNA pair of SEQ ID NO:75/SEQ ID NO: 215 or the CRISPR nuclease/gRNA pair of SEQ ID NO:75/SEQ ID NO: 261; the CRISPR nuclease/gRNA pair of SEQ ID NO:76/SEQ ID NO: 216 or the CRISPR nuclease/gRNA pair of SEQ ID NO:76/SEQ ID NO: 262; the CRISPR nuclease/gRNA pair of SEQ ID NO:77/SEQ ID NO: 217 or the CRISPR nuclease/gRNA pair of SEQ ID NO:77/SEQ ID NO: 263; the CRISPR nuclease/gRNA pair of SEQ ID NO:78/SEQ ID NO: 218 or the CRISPR nuclease/gRNA pair of SEQ ID NO:78/SEQ ID NO: 264; the CRISPR nuclease/gRNA pair of SEQ ID NO:79/SEQ ID NO: 219 or the CRISPR nuclease/gRNA pair of SEQ ID NO:79/SEQ ID NO: 265; the CRISPR nuclease/gRNA pair of SEQ ID NO:80/SEQ ID NO: 220 or the CRISPR nuclease/gRNA pair of SEQ ID NO:80/SEQ ID NO: 266; the CRISPR nuclease/gRNA pair of SEQ ID NO:81/SEQ ID NO: 221 or the CRISPR nuclease/gRNA pair of SEQ ID NO:81/SEQ ID NO: 267; the CRISPR nuclease/gRNA pair of SEQ ID NO:82/SEQ ID NO: 222 or the CRISPR nuclease/gRNA pair of SEQ ID NO:82/SEQ ID NO: 268; the CRISPR nuclease/gRNA pair of SEQ ID NO:83/SEQ ID NO: 223 or the CRISPR nuclease/gRNA pair of SEQ ID NO:83/SEQ ID NO: 269; the CRISPR nuclease/gRNA pair of SEQ ID NO:84/SEQ ID NO: 224 or the CRISPR nuclease/gRNA pair of SEQ ID NO:84/SEQ ID NO: 270; the CRISPR nuclease/gRNA pair of SEQ ID NO:85/SEQ ID NO: 225 or the CRISPR nuclease/gRNA pair of SEQ ID NO:85/SEQ ID NO: 271; the CRISPR nuclease/gRNA pair of SEQ ID NO:86/SEQ ID NO: 226 or the CRISPR nuclease/gRNA pair of SEQ ID NO:86/SEQ ID NO: 272; the CRISPR nuclease/gRNA pair of SEQ ID NO:87/SEQ ID NO: 227 or the CRISPR nuclease/gRNA pair of SEQ ID NO:87/SEQ ID NO: 273; the CRISPR nuclease/gRNA pair of SEQ ID NO:88/SEQ ID NO: 228 or the CRISPR nuclease/gRNA pair of SEQ ID NO:88/SEQ ID NO: 274; the CRISPR nuclease/gRNA pair of SEQ ID NO:89/SEQ ID NO: 229 or the CRISPR nuclease/gRNA pair of SEQ ID NO:89/SEQ ID NO: 275; the CRISPR nuclease/gRNA pair of SEQ ID NO:90/SEQ ID NO: 230 or the CRISPR nuclease/gRNA pair of SEQ ID NO:90/SEQ ID NO: 276; the CRISPR nuclease/gRNA pair of SEQ ID NO:91/SEQ ID NO: 231 or the CRISPR nuclease/gRNA pair of SEQ ID NO:91/SEQ ID NO: 277; the CRISPR nuclease/gRNA pair of SEQ ID NO:92/SEQ ID NO: 232 or the CRISPR nuclease/gRNA pair of SEQ ID NO:92/SEQ ID NO: 278; the CRISPR nuclease/gRNA pair of SEQ ID NO:93/SEQ ID NO: 233 or the CRISPR nuclease/gRNA pair of SEQ ID NO:93/SEQ ID NO: 279.

[0122] Embodiment 52. The enzyme system of any one of Embodiment 46-51, wherein the nucleic acid-guided CRISPR nuclease has trans-cleavage activity.

[0123] Embodiment 53. The enzyme system of any one of Embodiment 46-52, wherein the system further comprises a co-factor for supporting activity of the nucleic acid-guided CRISPR nuclease.

[0124] Embodiment 54. The enzyme system of any one of Embodiment 46-53, wherein the system further comprises an RNase inhibitor and MgCl₂.

[0125] Embodiment 55. The enzyme system of any one of Embodiment 46-54, wherein the system further comprises a crRNA.

[0126] Embodiment 56. The enzyme system of any one of Embodiment 46-55, wherein a CRISPR nuclease/gRNA pair is selected from the group consisting of: SEQ ID NO:22/SEQ ID NO: 115 or the CRISPR nuclease/gRNA pair of SEQ ID NO:22/SEQ ID NO: 138; the CRISPR nuclease/gRNA pair of SEQ ID NO:62/SEQ ID NO: 202 or the CRISPR nuclease/gRNA pair of SEQ ID NO:62/SEQ ID NO: 248; the CRISPR nuclease/gRNA pair of SEQ ID NO:80/SEQ ID NO: 220 or the CRISPR nuclease/gRNA pair of SEQ ID NO:80/SEQ ID NO: 266; or the CRISPR nuclease/gRNA pair of SEQ ID NO:91/SEQ ID NO: 231 or the CRISPR nuclease/gRNA pair of SEQ ID NO:91/SEQ ID NO: 277.

[0127] Embodiment 57. The enzyme system of any one of Embodiment 46-56, whereupon the system exhibits trans-cleavage activity when contacting a target nucleic acid sequence.

[0128] Embodiment 58. The enzyme system of any one of Embodiment 46-56, wherein at least one nucleic acid-guided CRISPR nuclease cleaves a ribonucleic acid molecule (RNA) target nucleic acid sequence when complexed with the guide nucleic acid.

[0129] Embodiment 59. The enzyme system of any one of Embodiment 46-58, wherein the at least one nucleic acid-guided CRISPR nuclease does not cleave a ribonucleic acid molecule (RNA) target nucleic acid sequence when not complexed with the guide nucleic acid.

[0130] Embodiment 60. The enzyme system of any one of Embodiment 46-57, wherein at least one nucleic acid-guided CRISPR nuclease cleaves a deoxyribonucleic acid molecule (DNA) target nucleic acid sequence when complexed with the guide nucleic acid.

[0131] Embodiment 61. The enzyme system of Embodiment 60, wherein the at least one nucleic acid-guided CRISPR nuclease does not cleave a deoxyribonucleic acid molecule (DNA) target nucleic acid sequence when not complexed with the guide nucleic acid.

[0132] Embodiment 62. The enzyme system of any one of Embodiment 46-61, wherein the target nucleic acid sequence is a sequence from an influenza A virus, an influenza B virus, a Respiratory Syncytial Virus (RSV), or a SARS-CoV-2 virus.

[0133] Embodiment 63. The enzyme system of any one of Embodiment 46-62, wherein the target sequence is from an influenza A virus.

[0134] Embodiment 64. The enzyme system of Embodiment 63, wherein the target sequence is SEQ ID NO:373.

[0135] Embodiment 65. The enzyme system of any one of Embodiment 46-64, wherein the target sequence activates cleavage of a substrate by the nucleic acid-guided CRISPR nuclease.

[0136] Embodiment 66. The enzyme system of any one of Embodiment 46-65, wherein the nucleic acid-guided CRISPR nuclease cleaves the substrate with a sensitivity of at least 25 nM.

[0137] Embodiment 67. The enzyme system of any one of Embodiment 46-66, wherein the guide nucleic acid (gRNA) is present in the reaction mix in a concentration ranging from 10 ng/uL to 100 ng/uL.

[0138] Embodiment 68. The enzyme system of any one of Embodiment 46-67, wherein the guide nucleic acid (gRNA) is from 40 to 65 nucleotides in length.

[0139] Embodiment 69. A method of detecting a target nucleic acid, the method comprising: (a) contacting a sample with a nucleic acid-guided nuclease system comprising: a nucleic acid-guided CRISPR nuclease having at least 90% identity to SEQ ID NO:1-93, or a nucleic acid molecule encoding the nucleic acid-guided CRISPR nuclease; a guide nucleic acid for complexing with the nucleic acid-guided CRISPR nuclease, or a nucleic acid molecule encoding the guide nucleic acid; wherein the gRNA comprises a nucleic acid sequence, e.g., a gRNA sequence, and wherein the nucleic acid sequence comprises a direct repeat sequence having at least 90% homology to any one of SEQ ID NOs: 374-466, and (b) allowing the target nucleic acid to activate the nucleic acid-guided CRISPR nuclease system to cleave a detectable substrate.

[0140] Embodiment 70. The method of Embodiment 69, wherein the guide nucleic acid comprises a sequence selected from the group consisting of the sequence set forth as (i) SEQ ID NO: 115, SEQ ID NO: 202, SEQ ID NO:220, or SEQ ID NO: 138 or (ii) a nucleic acid sequence having at least 85%, at least 90%, or at least 95% homology to any of SEQ ID NO: 115, SEQ ID NO: 202, SEQ ID NO:220, or SEQ ID NO: 138.

[0141] Embodiment 71. The method of Embodiment of any one of Embodiments 69 or 70, wherein the guide nucleic acid comprises (i) a direct repeat sequence selected from the group consisting of: SEQ ID NO: 395; SEQ ID NO: 435; SEQ ID NO: 453; or SEQ ID NO: 464 or (ii) a direct repeat sequences having at least 65%, at least 85%, at least 90%, or at least 95% homology to a direct repeat sequence selected from the group consisting of: SEQ ID NO: 395; SEQ ID NO: 435; SEQ ID NO: 453; or SEQ ID NO: 464.

[0142] Embodiment 72, wherein the nucleic acid-guided nuclease system comprises a system of any one of Embodiments 46-67.

[0143] Embodiment 73. The method of any one of Embodiments 69-72, further comprising detecting the presence of the target nucleic acid by detecting the cleavable substrate cleaved by the nucleic acid-guided CRISPR nuclease system.

[0144] Embodiment 74. The method of any of Embodiments 69-73, wherein the step of allowing and optionally the step of contacting is/are performed with the nucleic acid-guided nuclease system at a temperature that is about the same as an ambient temperature surrounding the nucleic acid-guided nuclease system.

[0145] Embodiment 75. The method of any of Embodiments 69-74, wherein the step of allowing and optionally the step of contacting is/are performed without subjecting the nucleic acid-guided nuclease system to a heating step.

[0146] Embodiment 76, method of any of Embodiments 69-75, wherein the step of allowing and optionally the step of contacting is/are performed at a temperature of about 30° C. or less, e.g., at a temperature of 27.5° C. or less or at a temperature of 25° C. or less.

[0147] Embodiment 77, The method of any of Embodiments 69-76, wherein the step of detecting is performed with the nucleic acid-guided nuclease system at a temperature that is about the same as an ambient temperature surrounding the nucleic acid-guided nuclease system.

[0148] Embodiment 78. The method of any of Embodiments 69-77, wherein the step of detecting is performed without subjecting the nucleic acid-guided nuclease system to a heating step.

[0149] Embodiment 79. The method of any of Embodiments 69-78, wherein the step of detecting is performed at a temperature of about 30° C. or less, e.g., at a temperature of 27.5° C. or less or at a temperature of 25° C. or less.

[0150] Embodiment 80, the method of any of Embodiments 74-79, wherein the nuclease is JW13166 (SEQ ID NO:62).

[0151] Embodiment 81, the method of Embodiment 80, wherein the guide nucleic acid is or comprises a nucleic acid sequence having at least 85%, at least 90%, or at least 95% homology to SEQ ID NO: 202 and/or SEQ ID NO: 248.

[0152] Embodiment 82, the method of Embodiment 80, wherein the guide nucleic acid comprises at least one portion having at least 85%, at least 90%, or at least 95% nucleic acid sequence homology to SEQ ID NO: 202.

### NON-LIMITING WORKING EXAMPLES

[0153] The following examples are put forth so as to provide those of ordinary skill in the art with a complete disclosure and description of how to make and use the present invention, and are not intended to limit the scope of what the inventors regard as their invention, nor are they intended to represent or imply that the experiments below are all of or the only experiments performed. It will be appreciated by persons skilled in the art that numerous variations and/or modifications may be made to the invention as shown in the specific aspects without departing from the spirit or scope of the invention as broadly described. For instance, certain master mixes can in principle be combined; certain enzymes can be replaced by others with similar functionality; certain buffers can be modified depending on the enzyme to be implemented; the number of segments can be altered (e.g., duplicate segments could be implemented in certain configurations of the device and/or certain segments could in principle be combined) without altering the spirit of the invention. The present aspects are, therefore, to be considered in all respects as illustrative and not restrictive.

### Example 1—Identification of Novel Crispr Cas Enzymes with Collateral Activity

[0154] Putative enzyme candidates were identified in a sequence screen from public databases (e.g., GeneBank, SGB, and MGnify), for enzymes with (<42% amino acid sequence homology to any characterized CRISPR-Cas proteins with >65% coverage. A representative subsets of the candidates (93 candidates) were designed into Cell-Free Protein Synthesis (CFPS) compatible expression templates for downstream protein expression. FIG. 1B illustrates representative steps of the method employed to identify novel enzymes from sequences that do not share significant homology to existing enzymes. Briefly, nucleic acid-guided nucleases can be encoded on a genome within proximity to a corresponding direct repeat sequence. To identify such sequences, a proximal cut-off for a relative distance between the CRISPR arrays—which contains putative direct repeat sequence information that can be incorporated into a gRNA sequence—to that of the putative CRISPR sequence on genomic or assembled metagenomics sequence input was set. As a result, the present disclosure identified predicted CRISPR array sequence information accompanying every single candidate from the candidate pool. Based on this CRISPR array sequence proximity, two gRNAs for each candidate where the spacer sequence was either at the 3′-end or the 5′-end of the direct repeats sequence were identified.

[0155] A PUREExpress cell-free expression system was used for translation of vectors encoding the nucleic acid sequences. Briefly 25-1000 ng of vector templates, in this specific example 500 ng of template DNA comprising a nucleic acid of SEQ ID NO: 280-372 were individually expressed the PUREExpress cell free system according to the standard manufacturers protocol. The predicted molecular weight of the identified candidates is as follows:

TABLE 1

| | Size |
|---|---|
| Name | (kDa) |
| JW13101 | 146.9 |
| JW13102 | 122.9 |
| JW13103 | 120.2 |
| JW13104 | 138.2 |
| JW13105 | 95.9 |
| JW13106 | 95.0 |
| JW13107 | 134.0 |
| JW13108 | 122.2 |
| JW13110 | 126.6 |
| JW13112 | 133.7 |
| JW13113 | 132.2 |
| JW13114 | 133.3 |
| JW13115 | 134.0 |
| JW13116 | 133.3 |
| JW13117 | 129.1 |
| JW13118 | 137.0 |
| JW13119 | 137.1 |
| JW13120 | 120.0 |
| JW13121 | 125.7 |
| JW13122 | 152.2 |
| JW13123 | 125.1 |
| JW13124 | 110.1 |
| JW13125 | 168.0 |
| JW13126 | 137.0 |
| JW13127 | 133.0 |
| JW13128 | 140.2 |
| JW13129 | 102.4 |
| JW13130 | 138.2 |
| JW13131 | 134.0 |
| JW13132 | 95.9 |
| JW13133 | 134.0 |
| JW13134 | 103.8 |
| JW13135 | 121.9 |
| JW13136 | 142.9 |
| JW13137 | 93.6 |
| JW13138 | 133.3 |
| JW13139 | 129.2 |
| JW13140 | 131.6 |
| JW13141 | 129.1 |
| JW13142 | 134.6 |
| JW13143 | 152.2 |
| JW13144 | 118.0 |
| JW13145 | 125.1 |
| JW13146 | 126.6 |
| JW13147 | 125.7 |
| JW13148 | 95.0 |
| JW13149 | 137.2 |
| JW13150 | 122.5 |
| JW13153 | 131.6 |
| JW13154 | 131.9 |
| JW13155 | 134.0 |
| JW13156 | 131.7 |
| JW13157 | 115.8 |
| JW13158 | 106.2 |
| JW13159 | 127.7 |
| JW13160 | 137.1 |
| JW13161 | 124.3 |
| JW13162 | 92.2 |
| JW13163 | 125.5 |
| JW13164 | 131.8 |
| JW13165 | 132.9 |
| JW13166 | 110.0 |
| JW13167 | 11.6 |
| JW13168 | 132.1 |
| JW13169 | 136.4 |
| JW13170 | 150.3 |
| JW13171 | 156.0 |
| JW13172 | 104.8 |
| JW13173 | 146.8 |
| JW13174 | 151.8 |
| JW13175 | 130.0 |
| JW13176 | 109.4 |
| JW13177 | 107.3 |
| JW13178 | 102.8 |
| JW13179 | 148.1 |
| JW13180 | 125.3 |
| JW13181 | 132.8 |
| JW13182 | 140.1 |
| JW13183 | 116.2 |
| JW13184 | 133.9 |
| JW13185 | 133.2 |
| JW13186 | 136.3 |
| JW13187 | 130.8 |
| JW13188 | 131.8 |
| JW13189 | 130.2 |
| JW13190 | 161.7 |
| JW13191 | 127.8 |
| JW13192 | 162.8 |
| JW13193 | 128.0 |
| JW13194 | 146.8 |
| JW13195 | 106.4 |
| JW13196 | 125.2 |
| JW13197 | 151.7 |

[0156] A fluorescence-based high-throughput activity assay was then used to differentiate potential active candidate(s) from negative control samples. Briefly, an RNase Alert system was used substantially as described by the manufacturer to set up individual reactions in a 96 well plate. For SEQ ID Nos1-93, negative controls, and positive control (LwaCas13a) an amount of RNase Alert® commercial kit reagents were added to each test well as recommended by the manufacturer. The reagents used in the activity assessment are briefly listed in Table 2.

TABLE 2

| Reagents | Supplier | Cat. No. |
|---|---|---|
| Nucleic acid-guided | SEQ ID NO: 1-93 | |
| CRISPR nuclease | | |
| RNase Alert ® | IDT | 11-04-03-03 |
| murine RNase inhibitor | NEB | M0314L |
| MgCl₂ | Ambion | AM9530G |
| gRNA | IDT | Custom |
| Target RNA | IDT | Custom |
| CRISPR nuclease free water | Ambion | AM9937 |

[0157] Activity was measured by the fluorescence released upon digestion of RNase Alert RNA substrate in the system. Although a few nucleic acid-guided CRISPR nuclease/gRNA pair(s) displayed activity above the negative control levels, a limited number of nucleic acid-guided CRISPR nuclease/gRNA pairs, including JW13124 (SEQ ID NO: 22) complexed with SEQ ID NO: 115 or SEQ ID NO: 138 displayed robust activity significantly above the activity level of the positive control, LwaCas13a. See FIG. 2 (initial activity screening) and FIG. 3 (further confirmatory experiments).

[0158] The experiments below describe the evaluation of the nuclease activity of a reaction mixture comprising JW13124 (SEQ ID NO: 22) without any guide RNA, a reaction mixture comprising JW13124 (SEQ ID NO:22) without a target sequence, and a JW13124 with target and compatible gRNA comprising a spacer sequence designed to hybridize/target FauA.

[0159] The reaction set up is as follows:

TABLE 3

| | CRISPR | FluA | |
|---|---|---|---|
| | Nuclease | target | |
| | JW13124 | sequence | gRNA |
| | (SEQ ID | (SEQ ID | (SEQ Id |
| | NO: 22) | NO: 373 | NO: 115) |
| JW13124 with target and | included | included | Included |
| compatible gRNA | | | |
| JW13124 w/o guide | included | absent | included |
| JW13124 w/o target | included | included | absent |
| NTC (negative control) | absent | absent | absent |

[0160] As demonstrated by FIG. 4, the collateral activity of JW13124 was only activated in the presence of both its corresponding guide RNA and the target sequence. Activity was measure by the fluorescence released upon digestion of RNase Alert RNA substrate in the system.

[0161] FIG. 5 is a chart illustrating the results of activity confirmation of candidate JW13166 (SEQ ID NO:62). JW13166 demonstrated a superior activity profile compared to the wild-type LwaCas13a under current testing conditions. Activity was measured by the fluorescence released upon digestion of an RNase Alert RNA substrate in the system. Table 4 describes the reaction set up for testing the collateral activity of JW13166.

TABLE 4

| | CRISPR | FluA | |
|---|---|---|---|
| | Nuclease | target | |
| | JW13166 | sequence | gRNA |
| | (SEQ ID | (SEQ ID | (SEQ ID |
| | NO: 62) | NO: 373 | NO: 202) |
| JW13166 with target and | included | included | Included |
| compatible gRNA | | | |
| JW13166 w/o guide | included | absent | included |
| JW13166 w/o target | included | included | absent |
| NTC (negative control) | absent | absent | absent |

[0162] FIG. 6 is a chart illustrating that collateral (i.e., trans-cleavage) activity of JW13166 (SEQ ID NO:62) was only activated in the presence of both its corresponding guide RNA and the target sequence. Activity was measure by the fluorescence released upon digestion of RNase Alert RNA substrate in the system.

[0163] FIG. 7J is a chart illustrating the results of activity confirmation of candidate JW13184 (SEQ ID NO:80). Activity was measured by the fluorescence released upon digestion of an RNase Alert RNA substrate in the system. Table 5 describes the reaction set up for testing the collateral activity of JW13184.

TABLE 5

| | CRISPR | FluA | |
|---|---|---|---|
| | Nuclease | target | |
| | JW13184 | sequence | gRNA |
| | (SEQ ID | (SEQ ID | (SEQ ID |
| | NO: 80) | NO: 373 | NO: 220) |
| JW13184 with target and | included | included | Included |
| compatible gRNA | | | |
| JW13184 w/o guide | included | absent | included |
| JW13184 w/o target | included | included | absent |
| NTC (negative control) | absent | absent | absent |

[0164] FIG. 8 is a chart illustrating that collateral (i.e., trans-cleavage) activity of JW13184 (SEQ ID NO: 80) was preferably activated in the presence of both its corresponding guide RNA and the target sequence. Activity was measure by the fluorescence released upon digestion of RNase Alert RNA substrate in the system.

[0165] FIG. 9 is a chart illustrating the results of activity confirmation of candidate JW13195 (SEQ ID NO:91). JW13195 demonstrated a superior activity profile compared to the wild-type LwaCas13a under current testing conditions. Activity was measured by the fluorescence released upon digestion of an RNase Alert RNA substrate in the system. Table 6 describes the reaction set up for testing the collateral activity of JW13184.

TABLE 6

| | CRISPR | FluA | |
|---|---|---|---|
| | Nuclease | target | |
| | JW13195 | sequence | gRNA |
| | (SEQ ID | (SEQ ID | (SEQ ID |
| | NO: 91) | NO: 373 | NO: 231) |
| JW13195 with target and | included | included | Included |
| compatible gRNA | | | |
| JW13195 w/o guide | included | absent | included |
| JW13195 w/o target | included | included | absent |
| NTC (negative control) | absent | absent | absent |

[0166] FIG. 10 (FIG. 10) is a chart illustrating that collateral (i.e., trans-cleavage) activity of JW13195 (SEQ ID NO:91) was only activated in the presence of both its corresponding guide RNA and the target sequence. Activity was measure by the fluorescence released upon digestion of RNase Alert RNA substrate in the system.

### Example 2—Demonstration of Ambient Temperature Collateral Cleavage Activity of JW13166

[0167] The activity of CRISPR reaction mixtures incorporating either JW13166 or wild-type LwaCas13a nucleases was assessed at incubation temperatures of 25° C. and 37° C. Each reaction mixture contained: 0.32 μL of 0.5 mg/mL JW13166 or LwaCas13a; 0.28 μL of 1 μM gRNA (gRNA sequence for LwaCas13a: GAUUUAGACUACCCCAAAAACGAAGGGGACUAAAACUCCUAAAAUUCCCUUAGUCAGAG; SEQ ID NO:467; gRNA sequence for JW13166: GAACUAUAGUAGUGUAAAUUUACACUACUCUAAAACUCCUAAAAUUCCCUUAGUCAGAG; SEQ ID NO:202); 0.63 μL of 40 U/μL RNase inhibitor (NEB, M0314L); 0.23 μL of 1 M MgCl₂; 1.5 μL of 10 μM Lateral Flow Assay (LFA) RNA reporter (FAM-AAAAAUUUUU-Biotin) (Integrated DNA Technologies; Custom); and 17.04 μL of water. Following the preparation of the reaction mixture, 5 μL of target RNA (50 nM) was added and mixed thoroughly to form a 25-μL reaction mixture, resulting in a final target RNA concentration of 10 nM. For each negative control, 5 μL of water replaced the target RNA. The CRISPR reactions were carried out at both 25° C. and 37° C., with reaction times of 2 minutes and 60 minutes. Each condition was tested in duplicate. After the CRISPR reaction, 20 μL of the solution was mixed with 80 μL of LFA buffer, and the sample application wick of an LFA strip (HybriDetect, Milenia Biotec) was immersed into the reaction tube and incubated for 10 minutes. The LFA strip was then taken out of the tube, and the LFA strips were imaged using a scanner.

[0168] With reference to FIG. 11a and Table 7, 2-min incubations with LwaCas13a failed to produce a positive test band at either 25° C. or 37° C. indicating the absence of detectable cleavage activity at either temperature. In contrast, incubations with JW13166 exhibited strong positive test band intensities at both temperatures, indicating that JW13166 retains cleavage activity at 25° C. With reference to FIG. 11b and Table 7, LwaCas13a produced visible test bands at 37° C. after an incubation time of 60 minutes but not at 25° C., indicating that the cleavage activity of LwaCas13a is significantly inhibited at 25° C. JW13166 produced visible test bands at both 25° C. and 37° C. after a incubation times of 60 minutes. These results suggest that JW13166 exhibits significantly higher activity than the wild-type LwaCas13a even at a temperature of 37° C. Moreover, JW13166 retained activity at a temperature of 25° C., exhibiting positive cleavage activity even after an incubation time of only 2 minutes, whereas LwaCas13a did not exhibit cleavage activity at a temperature of 25° C., even after an incubation time of 60 minutes.

TABLE 7

| | Temperature | | | |
|---|---|---|---|---|
| Time | 25° C. | | 37° C. | |
| 2 Minutes | LwaCas13 | No Activity | LwaCas13 | No Activity |
| | JW13166 | Activity | JW13166 | Activity |
| 60 Minutes | LwaCas13 | No Activity | LwaCas13 | Activity |
| | JW13166 | Activity | JW13166 | Activity |

[0169] The present technology is not to be limited in terms of the particular implementations described in this application, which are intended as single illustrations of individual aspects of the present technology. Many modifications and variations of this present technology can be made without departing from its spirit and scope, as will be apparent to those skilled in the art. Functionally equivalent methods and apparatuses within the scope of the present technology, in addition to those enumerated herein, will be apparent to those skilled in the art from the foregoing descriptions. Such modifications and variations are intended to fall within the scope of the present technology. It is to be understood that this present technology is not limited to particular methods, reagents, compounds compositions or biological systems, which can, of course, vary. It is also to be understood that the terminology used herein is for the purpose of describing particular implementations only, and is not intended to be limiting.

### SEQUENCES

[0170] Tables A-E describes non-limiting sequence listings provided with the disclosure.

TABLE A
Amino Acid Sequences (Enzymes)

| SEQ | | |
|---|---|---|
| ID NO: | Name | Sequence |
| 1 | JW13101 | MNQYIHADKKENKKRPNKSSIIRIMVSDFDDEYIQEIKVLYTKQGGVDTFKINKMSYDSASQKIIFEEVATQNML |
| | | SVEDSNLNFKRPMVECKNGDIYVVKPSGKVNAKGQAIEPLRSYKIHGKYLDLTEAIGKDNAELSGKKQIYLHVE |
| | | DLLGMHTTADSIDRRRLESETQRTLLSKEVMENYALIMGHEIKLNESDETYKLACSKEIYKANRFLDYRSRLLYY |
| | | YSFINHFLAGLSKGATYEYAGKSLVTEIPDGEVWQLCELEVTAYHGIYINKKTNELVNENCLEIDAIYAQMAKN |
| | | MRKTLNEFVENYNAMIEKQNELNKNKPQMKKAIVQEPIKFENFTEEKINQDLHNIVYILSDLRHKLMHFEYRYF |
| | | DLLMTGKKMGEKSEVEVSVPDRNSELPASKNQPSKDKFRKGKKLSELLNLNILKELDTFVKVKESYQTTYLETN |
| | | DKIEILGKLKTAKSIYQIYHQICQRKNGFNKFINSFFIVDGEENTEVKDCINEVFRKEIHYFETEIAKSNKDTLDDK |
| | | YKNKNQSQKTRDRMEDQIEECKRYQDDESNIDTWVAYHKDIHYSKRYKKLYSKHKTLVGNLNSAVSKGLDGQ |
| | | VIKKINDDIAIIKREMNEITKANSKSRLRYKMQMAYGFLFVEYGLKIPKFLNDFDLSHERTASKIKGYTSPEKVTQ |
| | | YLTNGEGNKDNFNLDELTKNFKKQMKFEFLKLNEDNNLIKLYILIYQLLPRELKGDFLGFVKSNYYDLKHVDFQ |
| | | TRETEAKDQFFHNMRLFEKNVKAFDLIQYSIGDEMSQLGNETFNFSQALSKIVSDDTILNSATEIPNINCLVYGSL |
| | | LKYYENAFRLSSEIEIRALIKIARKEKEVVDHSNSYSINKAHSKIEKELKERDRDKEVSFFCILEYAHKNSLNQKG |
| | | DYTDSEIYDKASNLRNKIAHCDYRNLFITNIICEAENINVKVKYLIDVSNTIGLNTVDLGNDMVNDYLMSYDKQ |
| | | MTYLVKTSEELLKESRLDKSKEKKERRDNLKNETRSHSEIYMEYEWISDYLVKLKDNHEILLKKNKTEDLKLNR |
| | | AYELIKNYNVALNNKSKIKISELTADHINNNWVNIWGVLNHELQEINGLYLYKVTPKIKKGIYLVLTDKKNYCL |
| | | NINFYTLKKVPSKDDSEMTEERYLRDISEKYYFTVGEDSMKALKDRLQTINDKCIVNYVNKIDCKNENLKGKSE |
| | | FKVIDVYNSWDKKYLSISNEESQHWSVETKRDKKYKENLILNLMEKSSFKLNLHQL |
| 2 | JW13102 | MAHNPTYLYAAYLNMARHNAYLTLSYISVAIGGKEGAEDKLLNMEALNILKKPKAEPEKLKKTEELLTKHFRF |
| | | LLPMTDNDKSAGYHEILTTAFKLLNSLRNEYTHYQHEASDFDEQFMKNMKNCFDGAKRTVKERFNLEDNDLK |
| | | HLDRFRQKANDGKKGKREYEENPTFHYKFDDENGRLTEKGLAFFICLFLEKKYATLFLTQLSGFKKGDTKGTKA |
| | | TKEVYSIYRIQLPKLRIDSKKPEMALGIDMLNELKKCPAELYDVLSTEDQKRFRIIPDEEPDTMDDTEDGEILLKR |
| | | HKNRFPYMALRYIDQNELFPNIRFQVALGTYRHHFYNKLGVDNIQRVRILQKQLKGFGRLDEIEEKRKTVWADK |
| | | IRPFEKIEKDSAEQEPYITDSYAKYIISNNKIGLKWFDRQNDYYLPELNEKGAKNEAPTCWLSIYELPALLFHSILC |
| | | NHSSDTQNIIRDYVSKGYRKLFKEVASGALQPASKEKIVNQLKTAYNLDFTRIPKELQDYLTGKPVKMDDQLNK |
| | | LCSERIAQMVSDSQKRLERIDNDLKTIKDRKSNKVGKKRFVEIKSGVLADFLAEDMLAFQSSSDNGKDKLTGMN |
| | | YQILQAALAYFGQYKDQMTEIFEKCKLINSPIEHPFLKNVMAKNATNIVDFYIVYLKAKEIYLDKCLREKQYKND |
| | | YFLHVDRQKWTERNTDFYKVLAKSYAEKLPVELPRGLFNDAIKKLLTKKHGDNPVIREALSKERCNTTFLIQTY |
| | | FKAICEDTTQEYYTFNRSYKIFNLLNDNYVGNKLQPAYYAVNEFEKRVKNIDAEIEKFDSQQHDKLHRLLHHFK |
| | | ENEKILRLYKVQDILLFLMAKRILITEMGENNIGKYQLKQIMPDSPTDILSAQTSFSITLTKNGCQKIIKQEKLKLK |
| | | NFGDFQRFVRDRRIETLFPYMKADSIDRQILEAELDAYDDKRVHIFELIHQFEESVLTKNPSILSGKTYINFAGILK |
| | | ASPEIQTEKRQQMQIIRNAFCHNTYPQKIEKNIEDIEKPEGKTDVPFSLCEKKEIPEIAEFLTESLEDLIIINEH |
| 3 | JW13103 | MDTPNFSERIPVSLQSHPYYFAHYLNMARHNAYVILEYVNRELIKPGKNLDEDNLIQSTVLKDGYFDRKPDELSH |
| | | RNRLLVQHFPFLREAENEGARTCNPVSYKLKTALAALNQWRNNASHYPLNQNHEKDFDLQPFFSFAIEACKKR |
| | | MREVFQPDDFYLLETNEKQFYTLHNENGFTEKGLYCFICFFLEKKYAFQFLAGIKGFKNTTDNKFRATLETFTEH |
| | | CCRLPKPKLDSSDIKLDMLGELSRCPAPLFDLLDIEERKKFIREPEEVKPDESGDREEVQQVLMKRYDDRFPYFAL |
| | | RYFEEKNLLKGISFHIHIGRWIKSEHTKKIMGAERDRRLLKDIRTFGELKEFSPEHAPDYWLRDGITPDDVDQFSX |
| | | PQYRIVGNRIGIKLNYNGHNRWSVPDKEINVKPDAIISTYEFLNLFLYEHLYQKKLTGLSPAEFIQDYLDRENNFL |
| | | SEFKAGHIRPVGDFSLEKRRGQGDEPDLTARRKSLQKELDRFVLKGKDLPDKIREYLLGYKQKSEKKQAKWILG |
| | | GMIKETVYWRNKAEQSPEKMRSGDMAQQLARDIIFLTPPHTVKEHKQKLNSLEYDVLQYALAYFSSNREKLYS |
| | | FFKEHQLTVKGDRAHPFLYKIRLDECQGILDFFIVYMQQKEKWLGWLDRNLKSPRLNEEEFFNTYSYFIKTDTKR |
| | | AIEMDYESCPNYLPRGIFNEPIAKAVQKAGVKIKDEDNASYALSVYSNGKTQPFYNKERYYNKGIFRMEELPEKL |
| | | QPKELLGKIQWTIKSSGKDTEEFRSLQNLKNRILNTEKEIRYVQSTDRALWIMVADLFPETFELRPDDLECIGHDL |
| | | SDDLLSRPYQMKEKVYNYTITDYLPIKRYGEFRRFLKDRRLENLLTYFEEGVPLHREALVAELEAYDLQRKNLL |
| | | EIIYRFEKLVFDRHRHELTFSGEGENQYVNHWDYLDFVARKYGLSAEVKELNSERFTELRNKMLHNQIPYQLWI |
| | | KEAIAAREENTVCGRIMGMIGEIYERMTTEIEKQMQV |
| 4 | JW13104 | MENQTQKGKGIYYYYTKNEDKHYFGSFLNLANNNIEQIIEEFRIRLSLKDEKNIKEIINNYFTDKKSYTDWERGIN |
| | | ILKEYLPVIDYLDLAITDKEFEKIDLKQKETAKRKYFRTNFSLLIDTIIDLRNFYTHYFHKPISINPDVAKFLDKNLL |
| | | NVCLDIKKQKMKTDKTKQALKDGLDKELKKLIELKKAELKEKKIKTWNITENVEGAVYNDAFNHMVYKNNAG |
| | | VTILKDYHKSILPDDKIDSELKLNFSISGLVFLLSMFLSKKEIEQFKSNLEGFKGKVIGENGEYEISKFNNSLKYMA |
| | | THWIFSYLTFKGLKQRVKNTFDKETLLMQMIDELNKVPHEVYQTLSKEQQNEFLEDINEYVQDNEENKKSMEN |
| | | SIVVHPVIRKRYDDKFNYFAIRFLDEFANFPTLKFFVTAGNFVHDKREKQIQGSMLTSDRMIKEKINVFGKLTEIA |
| | | KYKSDYFSNENTLETSEWELFPNPSYLLIQNNIPVHIDLIHNTEEAKQCQIAIDRIKCTTNPAKKRNTRKSKEEIIKII |
| | | YQKNKNIKYGDPTALLSSNELPALIYELLVNKKSGKELENIIVEKIVNQYKTIAGFEKGQNLSNSLITKKLKKSEP |
| | | NEDKINAEKIILAINRELEITENKLNIIKNNRAEFRTGAKRKHIFYSKELGQEATWIAYDLKREMPEASRKEWKGF |
| | | HHSELQKFLAFYDRNKNDAKALLNMFWNFDNDQLIGNDLNSAFREFHFDKFYEKYLIKRDEILEGFKSFISNFKD |
| | | EPKLLKKGIKDIYRVFDKRYYIIKSTNAQKEQLLSKPICLPRGIFDNKPTYIEGVKVESNSALFADWYQYTYSDKH |
| | | EFQSFYDMPRDYKEQFEKFELNNIKSIQNKKNLNKSDKFIYFRYKQDLKIKQIKSQDLFIKLMVDELFNVVFKNNI |
| | | ELNLKKLYQTSDERFKNQLIADVQKNREKGDTSDNKMNENFIWNMTIPLSLCNGQIEEPKVKLKDIGKFRKLET |
| | | DDKVIQLLEYDKSKVWKKLEIEDELENMPNSYERIRREKLLKGIQEFEHFLLEKEKFDGINHPKHFEQDLNPNFK |
| | | TYVINGVLRKNSKLNYTEIDKLLDLEHISIKDIETSAKEIHLAYFLIHVRNKFGHNQLPKLEAFELMKKYYKKNNE |
| | | ETYAEYFHKVSSQIVNEFKNSLEKHS |
| 5 | JW13105 | MKIKNENTDKKTELYSIDKYKGRDKWCFAIVLNKAQTNLTENPDLFEQTITKYDRIRKEGWFDEETKKLIYIQEN |
| | | EHKIKGEIKTLAREVLKNLRNYFSHHFYKQDCLIFPKDNIVRIIMGRAYERSEYEIKKNLKEDISIELPALFEPEGKI |
| | | TTAGIVFFTSFFVERRFLHRLMGSVQGFTKTEGEYKITRDVFAKYCLRDSYSVKAQDNDAVMFRDIIGYLSRVPT |
| | | ESFQHIKNPKKQNESQLSERKTDKFISFALKYLKDYGFEDLKGHYTAFFARSEIKKEKEDIEIKDDKKHKPHRMK |
| | | SKIEIHFDKTKEDRFYIERNNVILKIQRKGGRANILRMGIYELKYLVLLCLSGKAREAINRIDDYLNDLRNKIPHIE |
| | | NMNKEGIGEQIRSLPGFVRSQLGFVQIDDEKKKENRLDYVEKKWEKKRAESKELKLNRKGRDILRYINERCKKP |
| | | LTIDRYNRILELLVEKNIEGFYHELEELRKTGRIEKNITQALVGEKNINALHIKICKLVQDELKSLEKEDLKKYIGL |
| | | TPKEEKVVSFEEKLGRILDKPVIYKGFLRYQFFKNDKKSFARLVEEIIKEKTGGLDVPIETEYYSISTLGRFDKANK |
| | | TLYETLAMDRLCMMMARRYFLSLNKILAKRAQNIEWKKESGKEFIVFKFNMPQDTGKSISIRFSPKDYTKLYVK |
| | | NDSEFLARLCQYFFPNEKAIDYHKLYSHGINKYTNFQKEGIEAILELEEKIIKKRKINSPENYLSFEEILNQSIYNDE |
| | | EKNTLIQIRHSLLHYQILFSKNDLTKFYNVMKREGIEKIWSLVI |
| 6 | JW13106 | MIKKPANRFALPKVIISEVDSENILEFKVKYEKLARLDRFEVEAMHYDEKNEIIFDEVKVNDGLIEIVYKENNKKL |
| | | VVEIEGKAYEISGQKIGGKQRLLENRVSKTKVQLELMNHIEDGEGNKRVSRTERELIVLGDIKLYSQIVGREVKT |
| | | TKEIYLIKRFLEYRSDLLFYYGFVDNFFKVVGNEKELWKIDFNTSHSEQLIEYIKYTFNDNLKNDRQYLNEYVTN |
| | | DVQIQKDFNKVKNVFSELRHALLHFNYDFFQKLFNGQDVGFDLDIEFLNLFIDNIDKLNIETKKEFIGDEKIRLFG |
| | | ENLSLAKVYELYSHICVNRVGFNKFINSMLIKDGIENEALKDKFSTKFTGNAYYIDIHNSREYKDLYKKHKRLVI |
| | | NVSTLKDGRAIRQENKKIAELKKQMTTMTTTNSLARLECKLRLAFGFLYNEYNDYKAFKNSFDSNLKNNQFDV |
| | | SNVDTSKAYFLSTYENRKPRTRERIDKVLKEIESLELKGLIANDPLLKFILLMFVFMPQALKGEFLGFVKKYYHD |
| | | VHSIEKDTKDKEEDLIEFMPLSLKLKILGRNIRTLTLFKYALGSPINYNSTDEVFYVEGNRYGKVYKQLGISHNQE |
| | | EFDKTLTVSLLRYYSALFKLVNDFEIYSLAKGNPTVVNLDVLVDDSSSPYKFRGFYNFGNMIGQIHGLTHNQIKN |
| | | EEIMIRNKIAHFDIEMLLKKPLLAQIKLDVQRKNLIKFIEDRGDMKSVLGYDAINDFSMKMVHLRTKIKVNSDKL |
| | | QIMMGLLTNVKTPNDFYNIYKVKGIESINQHLLDVIGVTESEKKIEKEINEGNKRAVK |
| 7 | JW13107 | MENLSKEQIVETQEQNKRTWGNDPQYFGAYLNMARLNIYNVSNHLAEKFGITAIENEEQISNSFLGDKENKVFK |
| | | NKQNHIFSNLIRYLPIVKVFDFEKLPEEEKISLKDNFGKDFKELSDTLKIIFSEINEFRNDYSHYFSTEKKNKRKTKV |
| | | SDKLKDFLNINYTRAIQYTKNRFINVFSDNDFCLAEEAKLVENDNTITQDGIVFFTSMFLDRENAFQFISKIKGLK |
| | | GTQTKAFKAKREVLMAFCINLPHDKFVSENTEQAFSLELINELNKCPKTLYNVISENEKQHFLPKLEDEQIDNVL |
| | | ENSVPYTIDDYENYIENITKKVRNKNRFSYFALKFIDQKELFKNWKFQIDLGKVVLDEYTKTLQGKDETRTVVE |
| | | NAKAFGKLQHLNDEENVLNKINKSESKTHFEQFAPHYNFDNNKIGISRKEDSAIFISRNTDKKVKFNLKQPLPEAF |
| | | LSIHELPKIILLEYLENGKTEQLINDFIEINNSKILNKKFIESIKSKLTDFNTFNKRSQGRKEKSAYKKEALKYLLDR |
| | | KEKLNQILAEYNLNVKQIPTRILDYWLNVADVQEKTAISDRIKLMKRDCMDRIKAMKKGKAPKIGEMATFIAKD |
| | | IVDMIIGEEKKKKITSFYYDKMQECLALFADKEKKELFIHICNNELKLNESDGHPFLKNIILYDYRYTSDLYRRYL |
| | | EEKADNRNNLNKNDTSWLAKNFYFIEKVEVFDKRLNRMEFKPQTVVKIKDKSKIPFTLRQLEKEKSSFDTWFEN |
| | | ITKGKETTDKKKPVDLPTNLFDNYLKELLIKDLSKNNIKFNPKTNYNELFKLWWKECRKDKTQSFYNAEREYSF |
| | | EDKKLNFKINTKSKFEDYINPEFAEKVFKLKSSRREKENSTGRKLPPLMIKDLEKSMANKIGSIEKDIRILQEDDC |
| | | MMLLMFEKLVDNNLELKLENVDTLMNESIEIKQSILGKLSFDDFGDNVNKNDRIIISKNITETRKRKEYSVLKKYI |
| | | FDRRLPELFEYFETEDITMEKIKLELGTYNKAKDIVFDLIFDLESAIIKKNENRIKELNKDKNGNIQTGNIQHKPYL |
| | | FWLLEKNLITEQEFTFLNMVRNTFSHNQFPQKKTMELFIKNWNKNEYAKQILTVYTEKINNLIEKVIDI |
| 8 | JW13108 | MESFPDYKPLFAAYLNMARNNCFIALSHIAEKANKGGGMNEDAMQECSVITLLANNKKPDESLKVEEMIKYHF |
| | | PFTKSTKRIDPVPSDYAGLIISFIKQLNELRNFHTHYLHRPYATDANVIAQLQFLFDTSRREVRKRFALKEEDVKH |
| | | LVRKTITIINGEKVVVEKDNYPYAFVNKEGQFTTKGIAFFITLFLEKKHAYLFLKQLRGFKNSSSKQNKATLETYC |
| | | FYHIRVPQPRLQSQDTKVGYLLDVLEELKRCPKELYSHLSEHDRMRFTFVNDIDATDEQPESILKRNKDRFAHLA |
| | | LRYFEHTGSLKELQFYYDLGKYYFKVYEKSVDSEIRLRRLHKYMKGFGRLNDFGLENMPPLWQQLVKYTDQLS |
| | | EGYAEPYIVYTIPHYHIVNNQIGIWINNGFIPPLLSPVSSPEPQMWLSIYELPAIMFYHLLTKKRKEYKSVLQILSNH |
| | | RKAIHLLFKDIKDSKLLPDAVETFEAELRQRGLHRNHIPKPLLEYLLNESPGTPVAAKAENRLIKLQNETSFLFDKI |
| | | DIDLEKSKEKAGGKYYKPIQTGKIAQFLAKDMLFFQPPINKLKGKATGTLFQVLQARLAFYGRDKHLLEDIYREC |
| | | NLIQSNNPHPFLQGLPITDSLIDYYRNYLVRRNTYLEKCLKKCMQGKTGSQELHFLHLGEREKRAGNDYYKGLA |
| | | GKFIKMPLNLPRGLFMEELLKVFSAENKTMQDIADNSRTNTAFLIKEYLKNVLDDDTQDFYNWKRTYAVFNKY |
| | | YDNRKPQSRDSLIERYFDTSVLSTEAEKIKLEIVKKQRVDIEASENIKRNYRYYSENEKQIRHTKSCDIVLFLIIQDL |
| | | FPSLEQSVFKGLAINQLKLSDILPDAEKGILSLPIEIRLPLYNKFIIQRGIKLKNYGDFRRFLKDRRLQSLLPYFEEESI |
| | | DRVIIEKELQDYEIARIEIHRLVLEFEKKVITENKITYENSEINYVDHEKVLTAFFQNEPSSNKKELIRDIRNKFSHN |
| | | EYPDANKFKGLIESDSLNTTVAKKFIQIAKQYYQFEIAPAPPLLVLSPTSTTIL |
| 9 | JW13110 | MSIMNIITVLNHIHQIAGLKRNELGDDDNIYSHPVLKYIAPENNSTTLPEKRDLIKELLLEYLPFLEAMKDCYKEV |
| | | KVEKDKRNNKYVKDKKQVFIRNYSDIYCIYWTLYNIFSTLINYRDKSCHYRFIPSKDQEEYSKRTEYDTVRIINK |
| | | YYTYALRKTKEKYGYTTEQLSFIQNNRYTDDKKVNFNFFLSMQSSNNNLSHVGVAQLICLFLQKKDVDNFLEN |
| | | LPIYDNRYCLGIDEHMIIKRSLALHSIKLPKERLNSEKKDMAIAMDMLNELKRCPKELFNTLPFDKQERFRIISSDH |
| | | KEVLLMRSTDRFVPLILQYIDCNKKFKDIRFHVNMGKLRYLFSPNKLCIDNQERVRMLEHLLNGYGRIDEVEYL |
| | | RKAPNGTFGNTNIPIKGFGEIERDSADSNNYPYIVDTHTHYILNNNKVEFCFCEDSKNKNVFPTIEKEINGKWYVE |
| | | KTAPHCRISFFEIPAMAFHMFLCGSEKTEKLIKDVYNNYISLFNALKNGALTEENYKDFNIPECDMPKKILDFLKG |
| | | KAEGKSIDGYVKNILKKELKDTRKRIEQAPSEKDQMPSKRNKIGTKSYKRVLTGKLADFLAKDIVKYQPTLCAG |
| | | DDYGIDRMTGMNYRIMQATIATYNDDDDFDTFYNVFKMAGLVDGDERKNHPFLKKVLLSKPQNTVAFNIKYL |
| | | KEKEIYLRNIEKKNIIPPFVNRERNKWCERDCEYYRILGENLLDLPIELPRQMFYKDIRAQLEPLMPEIDFSQTNTT |
| | | YLIAEYLKRVRGDDFQEFYSWERNYRYIDFLKCIRDDNGRICAQYTTTEERESLWEDSKNRTAEYKRSEEQKNE |
| | | KKDKNFEDSLEERISSSHIKFQNTEKHIRRYKVQDALLFMIAEKQFGKYLDDIKAKNFKLKDIMPDTDKGILSET |
| | | MPIDFTFTKKNIKYNIHAKNLKFKEYGDLFILANDKRLESLWKILATDTVNKEEISEEFAKYDFCRPDITKLVLDF |
| | | EKDVLEKYPEIIEEAEKEYKKFDFKFILDWLINKKKLNYGIRNKLLLIRNAFNHNSYPDKKYAEVRELPEIATNLK |
| | | KTFDENAKKYE |
| 10 | JW13112 | MRIVKPYGRSHVEPAATGSTRRVLRLRPPNDKDAKDIEAFARSHEELVIAQWISALDKIATKPSGKDGASDAQR |
| | | AFRERLGNAAWTLLETKGLLPGLVTRREHLTMLWRAKVHPYGSTPYRPKRGKPAPSLKGRRYERFAGQLEVDK |
| | | VDAAAIAASIHAHLHGTAVPAVRPGLIATRARSIAENVLRPPQRLPNEERSWSDDDERAYAAAGDVAREIQELAI |
| | | AIEEDASQRRRGKPLTRSPFALRDAAPALRGQYGRLLVDASGDALPIAQARAAFPGLFGLHMAVRDCYSRILKD |
| | | HRKSSVVRILPRDMEELLRLVGAKLTNRDLNAMVRLGKVIHYQSSLGVEDSPENVAANWPADVSGSEFWTSAG |
| | | QAQIKRNEAFVRVWRHVLALAQRTLTDWIDPQGKTQGDILLANPPFNRDAYNRKSDLLFGKRASLFKGVETFE |
| | | NVVLTLARRETAALRHGSFHFKGLGGFTKVLAEVPKTDASVLAAVRTLWEDDLSERAQRLRQTLRGAHVEYFL |
| | | DEAQGRRLLSAVLADSGPATLPLPRFRRILQRAHNAWAKETDGPGLPEPANRMDIKTYPALHCRYVALKHVYE |
| | | RPFRHWLEQRDAASLNRHIDRAVDRGTKAARDLNAGDDEDRRRIIVARAASLGRLAEDDNVQDFFFELSAETA |
| | | GEMRVQRGYASDAEAAREQAGYIEDLKCDVLALTFADYLKAAGLDFIRILAPETPRPDNAAYNLDAIEAPEIDTP |
| | | GEDWQRVLYFILHLVPVEDVGRLLHQTRKWEILAGDETLSPSVRDRLRGIQLALELYLDMHDAKFEGGAALVG |
| | | TGAFKDLFETARIFDDIFPSQPGSAQTADDERRVPKRGLCEIMRFGHRPALQPIFSRYRVTEREVEEVRAMEWPV |
| | | DGTSEIARLQDRRERLHKGWTENKSGLSGDDLRAYVAALREVAAHRHLAAHVTLTNHVRLHRLLMAVLGRLV |
| | | DYSGLWERDLYFVTLALIHRAGRRPADVLPADGLRFLANGQIVEAVRRLEPDLQSRLLDCLGDIDKNGKVRIRN |
| | | RFAHFNMLQPGNLPVDLTRCVNDARELMAYDRKLRNAVTQSVKELLAREGLMLGWAMGADHRLSAATLATR |
| | | QAQHLGKTRRGEKGWHERKLRPIPILEDLHGRRFVDMAAALFGGTRLEPERSLLDHPLDRIEWNPTPKNRYGSR |
| | | PTSGQGRRNVVPR |
| 11 | JW13113 | MENQELKTRTMKSEPYYYGAFLNMARLNIFNISNHLSNKLNILPTLSSEEHIANAFFTDKNTKIKWEHTYDILRRF |
| | | IPIVKVFDTESLPKGEVGNNTGKDFSKMSDTLKIIFKELNEFRNDYSHYYSTEKEDKRKITISDELANFLNENFKR |
| | | AIAYTKKRFKGVFTEKDFELANNIQLFNKDKEITEKGLAFLTSIFLEREYAFQFISKIEGLKGTQKSEYRATREVFM |
| | | AYCVNLPHDKFISEDAKQSFSLDIISELNRCPQTLFNVITEKEQEKFRPTINQQEKNNIINNSVPYDIEDYEEYVNSI |
| | | TKKIRYDNRFPFFALKFIDETQVFEKIRFQIDLGEILLDEYTKQLANNEEKRQVVQNAKAFGRLNDFIDENNVLEN |
| | | INKQNGSASFIQYAPNYNFDNNKIGIDTTGKRIMPILTKQTDNNKKVKNKLKQPLPKAFLSIHELPKIILLEYLEKG |
| | | KAEKLINDFLLINESQLLNYKYIEEIKNKLNNFDVFQKRSQRKKLQTAYNKTNIEELQSRKEELNKILKEYKLND |
| | | KQIPTRILEYWLNIEDVTPNEAISDRIKLMKRDCVDRLRDIKKGKAPKIGEMATFIAKDIVDMIISKDIKQKISSFY |
| | | YDKIQECLALYNVSEKRDLFLTICNELRLLDADKGHPFLKNINLNRINYTSDFYVKYLQEKGHKLIKETNYRTGK |
| | | LVEKDKSWMFLNFYYLKKNETLNKMMTIVQLPDDKSKLPFTIAQLDKPKNTFEEWINNITKGKTKTDKEKPIDL |
| | | PTNIFDKEIEEILKNKLSEEKIAFTENANYNQLFKLWWTDCRKDNVQKFYDAEREYVIYDEHVKFIPNTKPKFEN |
| | | YYNESFPIVLTRLKRDREEARKLNRKLPPIEKSQVEKVFKQAIGSTEKEIRLLQEEDRIMLLMFEQLLETDNNLNL |
| | | KLNNAESLLNEQITIKEKISLKLSFNEQEDKKEIIKTIIDKRKRKDFSILRKFKYDKRLPELCEYFETDDISHSDLKK |
| | | ELDEYNKAKEQILANAFMLEKTIIEKDKDGIKALFLNDNGEKKYGNVQHKPYLTWLKNKGLINDNEYLFINMV |
| | | RNTFSHNQFPQKRTIQIFIDKNRGNPITFAETIKNAYNKKIEEIIVKIK |
| 12 | JW13114 | METQENELFENRRRTLADDPQYFGAYLNLARLNIFSINNYLAKEFQQTELRDDELIQNGFICIPSQKNRNDNKLFE |
| | | RLIRLMPVIKQFDAARLPNEEQKSGQAEGKDIKTMAKTLKALFKDMQEFRNDYTHFYATDKQECRKLTVSSET |
| | | ATFLKASFARAIEYSKVRFKDVLAEDDYSLVAGKELVEDENTITTEGLVFFTALFLDRENAFQFIGKVQGLKGTQ |
| | | FKSFIATREVLMAYCVRLPHDKLISDNPIQALLFDILNELNKCPKKLYNVLSEEVKKEFRPELSESGIENMLANSF |
| | | NDEEREKLLDEIEYKEYIEQLTIRVRHSNRFHYFAMRFIDEQELWPGIRFQIDLGKYTLTQYDKQVLGESIPRSVV |
| | | ENTRAFGRLSNFLTADPDSLEQRIDVDHRANGFEQFAPHYNADINKIGIAFTEKEQLPYVVPTKNAETNRVKYSF |
| | | KQPQPDAFISLHELAKAILLEQLQPGESEKLIRAFCSTAENKLFNLEFIESIKWKLPDWKPFQKQCDTKKSRAYITK |
| | | KKMFAYAPRDRKKLLDELLAPYGLNWKQVPERILNYWLNIEEVHDARSIKERILLMKRDGLKRLKQLEKHRKD |
| | | PSIRIPKVGEMATFLARDIVDMMIDKTKKQKITSIYYDKMQECLAFYADAEKKRQFIGLVRELNLNAPDGHPFLK |
| | | NLNLESIRKTSEFYKLYLMEKVEKMIENGYKSNGDKRFKNIAWIIRVFEEKQKNEKNGKDDTIYRIPNNRNDIPY |
| | | TIRQWEKETSTLEEWLHTINHGKQEGDRKRPIDLPTDLFDARLCELMKGQMQENGQTFADTAKYNELLKQWW |
| | | SLREDETQPFYNGARHYVIKEEAVCFMPGAQPRLTSCYADAVEEAYNRLSAERNIARRHNKQLPLIQKQKVEKV |
| | | FKHTLYDTEREIRLLGEQDRILLLMAEQLTPGRETLKLKTVSEELTRPREIKKEFPYISNYNAQGEKLPKDEPKPKI |
| | | KVTVTGIMQLKNSNDLNRFAHDRRMPELVAYLPNATIDADTLRYELMDYNKARLTVFDAVFRLEKAIIDQDRE |
| | | GVITLFTDEQGEAKQGRMQHKPYLQWLLNKGIITQPESSYLNMLRNSFSHNQVPHIAVALNGTEVVPVKNIASTI |
| | | AGAYKQKIETIIGKIG |
| 13 | JW13115 | MNNNILEQSTSGSEKRASTRTLEADPQYFGVYINMARHNVFQIINALTHKFSKQIENAKPINDDENIANDYLINIG |
| | | KGTDKSPTIIEVLNPAHPLHRLYGEHVFRALKRYLPLVTIFEVPSINTEDIIKDTDDILPVLFQDLYEFITLLFYELV |
| | | KFRDAYTHALALDEQGNIVPRKIDLHPNLRHYFEHLFYKAPDYTLRRFRSTQEKIAHGFHEKDFALLKAHNLYQ |
| | | DPHSNELTTQGLFFFTTLFLEQKYAYQFLKRFNGFKNETIQPFKATLRVFTAFTVKLPNDKLASDHPGQSFLLDM |
| | | LNELNKIPQSLFKHLTPKDQEMFERINDEALTNILKNTDEASFKDVDDLLGKMAPLIRREDRFPYFALWFLEQTK |
| | | AFNHIRFQISIGKIAYSPYDKTIIGETSPRIIKFDIHGFGSLAEFSDEDTLLTTLKRQLPAGSPHASLTFSQYAPHYHIK |
| | | NNKIGILVDYPSGDRPLSNITQQPDGKIKVNHIKPTAFISINELPKLVVLALLGTNKDNKPIGNDIERLIRSFITKFKN |
| | | QLFHLAPLTKIKNGLTFSPETFTRRMDKDKMVKGRIPKSELAKREEYKIYLEKRKAVLQGTTDLKLNVNQLPTKI |
| | | QNYLLNIDEVSDEKSIHLRIKTMIKEVEYRLKKIDRNKLPKVGDIATYIARDMLDMVADVRTKSRITSAYYSQIQ |
| | | RALAYFALDKTRLIDLCDELGLFNHQTGHVFLIREIFLNNHHILGVYREYLTKKQNWIDQNLIVKIQERGKRLTK |
| | | YILPTNRPLPYKMKQSINKGFEFNAWLQHKSTMPIDLPTTLFDESLTSLLKKTIAQKLGIASKSEDKFGRLLDRLL |
| | | KQDTQPFYKFERIYRKPFSQEEPEPFNILKLTHTALKQRFGKPAEVNEKIIRHHQRKDQIVRLMCEHLFKNNSELA |
| | | FEGEFLLENLHPASRNNPLDAPMVFEQTIPHTHKKIVAQDSNKWIQEVKKTNNRNKAWYRWTLKDFGTFRKIIH |
| | | DRRLPALVNSITGDEIDFDLVQFELAAYDRARETIFDQLFLLEQFIADKDMSYIKQHKAIERMQDGKGFDEVQFN |
| | | TYADWLSDKGLLTPDEINGLKEIRNRFSHNQWPGISKLGIQPISQEQQSAFVTHLNIKGWVNEHHTPLAMFMEKL |
| | | VINWVSKAIT |
| 14 | JW13116 | MGVEKNKVFESVIMNFDQERKYGFIEYKETNNLFFHMENVKNPKEIVKGAKVRFEIYENPKPKKQNQRFSAINV |
| | | EVITDETHKEAKIQKNEFKTFDQFTKELQETQKVNGETKKEHITKNKHTNVKAAGVKSVFAVDDGNVLITSFGR |
| | | GNAADIETLKSDDDKTINLTETENQKKYVVTNKRSNVKGLADNPTKVESIIPGETQIGFKSILEKHFFGRTFNDNI |
| | | HIQIIHNILDIKKILAVHTNNIVYALDNIHERGRENSAEKPIDMIGAGGISTSKEYEQYCSEKSDYEDNFLKQLINNE |
| | | RIAYFGNAFFKDEGNKKVMRTEKEIYYILGMLNEVRNVSTHFTEEDNRDWAKANLYNLSNRLKVGSKEVLNQL |
| | | YKEKIDKIDANGFVNKGCKRDFSILFKSLNLTTDKDKGELVVGFYDFSIRKNYKNIGFSIKTLREYMLKISNSTLC |
| | | ADTISNNAIRPKAYKLYDFIIWHYYMNKPDKINDFVEKLRTQNKNDEKIKLYYDEAVCLLSELGREIHTMTSCVH |
| | | NIENTSYEITDKKQKEYYKMQINSLNSADKVSDFSKVIYLVTLFLDGKEINDLLTTLINKFDNIASLLSVLEKQSG |
| | | KKVEFVENYSFFNSSNLLKEKTLNKSENYTCKIVEELREINSFARMTGDCKIRKSAFEDASQLLGYHDKTVNNLF |
| | | EVLRLKELESKDWKKRTDDEQQEYDRLLNKHHYFKSGKKLPDTGLRNFIINNVIESRRFNYIVRYADPKKIRKCT |
| | | ENNELLKFAFKDVPDSQVDRYYNICVTNKITNATREEKIERLVDIIKSMNLSKVATVKQRDKQDNVEKQKQLAI |
| | | MSLYLNILYQIAKNLVYVNSRYVMAFHSLERDSQMLFDAYYDVKRGYCDLSTVLLFGVDDLQNRNRGSYKYL |
| | | RDNRRSNKDVIETFGDFKGKVSKVVEKKNQGLTNEIYDSLCNVAGTTKTEVQNEIKSILKSNGLDESASSYLSHK |
| | | LVNKVHSYKYLKQNLDCADNTMINQFRNNVAHLNTIRNMDGIENVTGITSYFQIYHYLMQKALYKEFKKCREN |
| | | AVRKWIPYITENAEPKYVYWNKKEQQEVEVSFNPKIFGYMENIKNHSNTYCKDFVKALCAPFAYNLPRFKNLSI |
| | | EELFDMHELSEEPKESMKLTD |
| 15 | JW13117 | MEKSKLDNEMTFAEDAYYFAHYANMARHNAYLILNHINKSIFGNESTLKEENLQIAIIKILDPKNGADHHAKAIK |
| | | LLNHHFPFIACYYKEDIKKAVENSAYKEMNDKKLDHLKEPLTLKQILKTLTGIRNELNHYGYSRKEHPIPFFQDL |
| | | FNDSIQLAKKRMIEFNETRFNSIQDSPYHKMVDPKDSVLTDTGKLFFLCLFLDKKNAFEMLAKVKGFKNRTDEK |
| | | YRATLECYTQLCCKTPYPKLESSDISLDILNELNRCPNALYQVLSEEDKLKFKKEPNEETAEELNPIMKRYDDRS |
| | | AYLALRYFDRTKCLDNITFHLQLGRKVMGEPHKKVFDGKERTHQILKEMRVHDKLSTYETEEAQTFFQSKIESN |
| | | EVELFAPHYRMVGNRIGLSFGTPSEKKEGYSIPINNQPAPQAILSTSELGALYIYNRLYKENKITQSPKNLMSTYL |
| | | QTMNRFIKDWKNDGIKPETSSNKIIKERNQERTKQTINELKRRTDHLQKLLDEKYAGLKVKHLPDICREHLLNYQ |
| | | SDDNIQQAIDFLKKTLSDTNFKKKQLEQFERNMVYRSSNSKQLKIGEIAQELARDIVFFLKPIKKEITNRNKEKVT |
| | | VFQKINNQDFDILQNRLAYFSLYKEELCSFFDDLLKKKHMKHPFLENVKAETKWSNGLIEFYLKYLEHKLKWLN |
| | | TYTKNAPNNTTRPNYTTSNRINKNRSTPNKKDEIEEKEIDPEKIKETFIEKYNYFLKVKTSSPKNYQGKAIFIPVGL |
| | | FNDAITKAMKESGYQVEDDEKTPNAAYWIKSYFHGATQPFYQLPRYYNRAKKDEERDLVEAALLKKEIKNYYV |
| | | KANKKTQNDFKQLAKRIRKQEEEILTQQTSDRVLFMMATDLLNGGSDGRQTIECEQINTLGFNLGENKILDENR |
| | | KVSMNIYGRKVVSELPIKRYGEFRRFMKDRRLENLINYFPEGKDIELGVLKSGEVEAVGERFSSSTLANELEFFDS |
| | | QRWLLMKSIYEFEKKIYTHFFDVLTKNVPEKEMMENNYIAHYHYIECAKKLELSVSELEKDDFKELRNKIQHNEI |
| | | PYSQWIKNRISTKDGHLITKQIVELVLSIYQQMNNELDQLIRK |
| 16 | JW13118 | MNHTIGKGISYNPFKHQDKHYFGSFFNLADNNIKDVFNEIAQRLNHKDSNPKNIINHYTDKNISLVDFEKFVSLLS |
| | | NYFPIVNEIDQINCDAKGSNGNYKPKTKEERLGYFKKTSYSLLEAIDKLRNYYTHYHHEPIEIDLNLFPFLDHVLL |
| | | KTALNTKKNYLKKGKTKELIKDNLKQQFDFIFNIKVEEYLKEKNPTSKKIERAGGKIENFNKSLVEEITSAIYNDA |
| | | IKDFIYSKGENAELSNRKKTSFSDKDYFYYNDDDHFSLPISSSGIVFLLSCFLNRKEIESLKDNITGYKGKIPNSELT |
| | | LKHNGIRFMTTHRIYSHWCYKGLKTKIRTSEKATRETLLLQMVDELSKVPDVVYQNISDDLKKTFIKDLNEYYID |
| | | NQENQENLYNSKVVHPVIRKRYEDKFNYFAVRFLDEFLDFPTLRFQVHLGNYLEHSTSKNIGNSKTNREIKKKIF |
| | | VFGKLSEVNKLKNDFFEKNKQNDTSWQFFPNPSYHFPMENSNDLKKANKIGIYINHDKSINKFKHQTQKQTHEN |
| | | KIKLIQKVIGDKSKIKIGQPIAYLSMNDIHSILFEALKNPKIKESGKIDGEHIEYKITHQINKQIKEIQNKNENAKIIK |
| | | NQQSKQETDFNIDKLIKDVNKEITISEDKIQTLKENKKQYQNYQRSKKSEKHNNSRKRNHILYNSEKGEIATWLA |
| | | NDIKRFFSKDFKDKWKGHHHSNFQRNLAYYNTQKKEVELLLKGLDYRKTIPMLDFSKNSFLDFYRKYLEKRKQ |
| | | YFKNLLSELKNHKSGKHDSIEKLKKKCFTHFKKRNYRNKTIEDKIQNMLANPIFIKRGFMDTKPTMIPGKNFNQN |
| | | KSDFADWFVAFKEFSEYQKFYDTNLYPIDLSQKSKSATKKINTEIYKQKKNDWAIWQMTKYIFKDIFQQDSQNIS |
| | | LSEIYQSRQEPISNAKNTATDKRKQNSIWDSTIDLQLNRKIKISDVKLKDIGNFRKYENDQRINTFLDYGDFSDW |
| | | MAYLPNNWQENFEYKPINVIDIQLDDYEKIRQNVLLQEVQNLEREIYNNVSNKNEILVQDSKGNKNPNFKAYIL |
| | | KGLLKQIKNLDITNFKLPQNAKEFDTLTFKHLQTLSVIEQKTTLLILLRNKFAHNQLPNKAAYEFCQTILEREKSQ |
| | | TYAHYYSELFKTLKKELTDI |
| 17 | JW13119 | MMETIKQEIGKEYNPFKTEDKHYFGGFFNLADNNIKEAFNEVSIRLSQKGASPKTLIEKYTKENVSLVDYERFVIL |
| | | LSDYFPIIKEIDQINKDEKDNKGILIPKTKNDRIKDFEVILVSMIDAIENLRNYYTHFYHESIEIDNKMFYFLDKVLF |
| | | KTVLDTKRNYLKEDKTKEMIKNTLKEDFNKIFNLKVDEYLTKDNLTSKKIKKARKYGNSFDIGLTKEITASIYND |
| | | AIKYFTYDKNEKSILSDSRKTAFNERDYFYRDKNFDLPISSSGIIFLLSCFLNRKEIEDLKSNIKGYKGKVTKNEEPT |
| | | LEKNSIRFMTTHRIYSIWHYKGLKNKIKTSESATKETLLMQMIDEVSKVPNVVYQNLSKDLKDSFIEDWNEYYK |
| | | HNEENTENTINSKVIHSIVRRRYKDKFNYFAIRFLDEFVNFPSLRFQVYLGNYLVDSRPKESANVITEREIKKKIFV |
| | | FGKLNEVNQLKNDFFSKIEEDKLETNLEVFPNPSYHFPMENSEELKSANKIGIYLSDIENLLEPFKKHLNKNTSQE |
| | | KISLIEDITQQNENIKIGQPLAYLSMNDIHSVIFEVLKNPIIKDGKIDGKSVEKKIKNQIYKQINEIKNKKEESKIIKNF |
| | | RKKTESDLDLKKMIDDLIKEIKITDDKIKKLDENKKEYFDYQKNKTAKKRNYILQNSEKGEIATWLANDIKRFFP |
| | | KEFKEKWKGYHHRELQLSIAYYDTQKQNVKLLLYGLDYRKEIPMLDFSKPNFLDFYEYYLKKRKPQLYNLLSD |
| | | LEKLERGESINKEMLLSKYFKLFRKSNYQNKSLDDKINTALANPIFIERGFMDGNPTVIPNTTIKGNESRFANWFV |
| | | AYKQFDEYQKFYNTEEYFLELKDKTPNEIKKIQSQIYTQKKNDWAIWKMISYIFKDIFNQDLQNVSLSELYQNRE |
| | | QRLENEKKSKEGERKQNFFWNKTVDLQLNNKINIPEVKLKDIGNFRKYEKDERIKVFLSYNDITDWMAYLPND |
| | | WQEKHTIKPINVIDIQIDKYEKIRQHHLLKEVQNLESEIYNKAINKEELLQEDIKGNKNPNFKKYIVNGLLKQIKG |
| | | LNVENFKIPNSDKEFNALSEETLRSYTELEQKVTLLVLIRNKFAHNQLPNKDVYAFTQSIRKRQKNETYAEYYFN |
| | | LFEKIRGEI |
| 18 | JW13120 | MDTPNFSERIPVSLQSHPYYFAHYLNMARHNAYVILEYVNRELIKPGKNLDEDNLIQSTVLKDGYFDRKPDELSH |
| | | RNRLLVQHFPFLREAENEGARTCNPVSYKLKTALAALNQWRNNASHYPLNQNHEKDFDLQPFFSFAIEACKKR |
| | | MREVFQPDDFYLLETNEKQFYTLHNENGFTEKGLYCFICFFLEKKYAFQFLAGIKGFKNTTDNKFRATLETFTEH |
| | | CCRLPKPKLDSSDIKLDMLGELSRCPAPLFDLLDIEERKKFIREPEEVKPDESGDREEVQQVLMKRYDDRFPYFAL |
| | | RYFEEKNLLKGISFHIHIGRWIKSEHTKKIMGAERDRRLLKDIRTFGELKEFSPEHAPDYWLRDGITPDDVDQFSP |
| | | QYRIVGNRIGIKLNYNGHNRWSVPDKEINVKPDAIISTYEFLNLFLYEHLYQKKLTGLSPAEFIQDYLDRENNFLS |
| | | EFKAGHIRPVGDFSLEKRRGQGDEPDLTARRKSLQKELDRFVLKGKDLPDKIREYLLGYKQKSEKKQAKWILGG |
| | | MIKETVYWRNKAEQSPEKMRSGDMAQQLARDIIFLTPPHTVKEHKQKLNSLEYDVLQYALAYFSSNREKLYSFF |
| | | KEHQLTVKGDRAHPFLYKIRLDECQGILDFFIVYMQQKEKWLGWLDRNLKSPRLNEEEFFNTYSYFIKTDTKRAI |
| | | EMDYESCPNYLPRGIFNEPIAKALQKAGVKIKDEDNASYALSVYSNGKTQPFYNKERYYNKGIFRMEELPEKLQ |
| | | PKELLGKIQWTIKSSGKDTEEFRSLQNLKNRILNTEKEIRYVQSTDRALWIMVADLFPETFELRPDDLECIGHDLS |
| | | DDLLSRPYQMKEKVYNYTITDYLPIKRYGEFRRFLKDRRLENLLTYFEEGVPLHREALVAELEAYDLQRKNLLEI |
| | | IYRFEKLVFDRHRHELTFSGEGENQYVNHWDYLDFVARKYGLSAEVKELNSERFTELRNKMLHNQIPYQLWIK |
| | | EAIAAREENTVCGRIMGMIGEIYERMTTEIEKQMQV |
| 19 | JW13121 | MFDNEQKNLEKEPYWGVFLNQARLNAYIALRDISERLEENAADEDSLSEWPVLKYLDNDTDAVKSRRIFDLVE |
| | | KHFSMLKIIYGGEKEGDLVKRSKEYKIILKCLFRALNFYRNKFCHMYSGNRARKYNEKELIKYLEDCFDASVRKI |
| | | KELRRLDEKDVLHLRRKIAEGKDANKRVIDNPQFRYPFKNEKGELNEKGLYFLASIFLDKKEAHEFLKKQEYFK |
| | | NDSEPKYRATLESFYHYRIKLPRPVIESDVDKNGLALDMLNELKKCPKELFDLLSKEQQEKFRVVDSEDADEEG |
| | | NEILMRRYSDRFPYLALRYCDENQVFERIRFQIDLGRYYFKFYPKETIDGKTQQRSLDKRLKIFGRIKDVKSKVEQ |
| | | EWSGIIKSPDTIEENPNEPYKLKTTPRYNIVDNQIGFVITGDKNLPDVKRPDGRIELEKPDGWLSIYELPGMLFHGL |
| | | KYGFDKTERMIKIYIEKQRKICKEICEKGTITPDDGESMPEALKGGAKAAKRNYSEKKLERMLQDTEQRIRAIQT |
| | | TQKRMDEPGNKPGKKKFFDIRAGKLADFLARDIMALQRFDPAKHGKDKLTAINFQVLQATLAFYGAKKDVIED |
| | | MFKGIGLLEGDNPHPFLNQIDPAQYNSIAGFYQAYLQKKRSYLEDYRKEEEYDEQFLRPKRQRYAQEKREIKTV |
| | | ARQLLDNPVNVPKNFFKKEIEEFVFSQDPSLKKSKMNTAYMIQALFEKHYGRQQPFYSYNRTYPVVSKAIEYGK |
| | | KGKNKKIAKVLMAIEPKLNYMEIKKIVNEMPDGQYEPENLKRNLYEGYKDYEKDERIIRRCKVQDVVSFMMVE |
| | | ETLKDQLDFNGNVLTLEKITPWEASPFKKPVLCHTIISIPFNTKGGHTDKDYVDFIKNNFEGSYDCEPNKIILKYK |
| | | VTSKDTKLKDIGKYRMYSHDRRLPGLLIWKYRPNDQNGNEIKFTEIEQEIKAFERRRIEIAQCLYTLEKKVIDSWF |
| | | TQDELGEEHIPFNKVIDVIKAKMPNFEDKCNVLLKIRNAINHNQFPVYEQAIQTAPGKEIAGKMLRITESYIEQIM |
| | | AKIDPDFGRTEDAESSR |
| 20 | JW13122 | MPXXNNQKKKADSIKRXSPSPSRINGVAKPRPLVVDENNKHVLGGYFGLGLNNFYKATLSIFARTGIKIASKNGT |
| | | VLYPEEKIGQVIRVLRRSISDTSGNLTHEEKVWSNAFKLSSSQEMRLQKLIFHHFPILGPIMADEGAYKASTNKKS |
| | | KVTDAYSMTYGVTLEECLDVLGDLAQTLVDCRNSYTHFYPYNSKESTADQLALQSKTARYLDKVFTASRRLDK |
| | | DRNNIDTAMMEFITGSARNLRQYVERYGFYPKYDETVTYEKDTRGRERMKKKMTERDDFFYKIGNEKECDGK |
| | | RYTVLSGFGLSFFCAVFLSKTQTRNMLADIRLFETSPYPKELDDIIRDMMSIYRIRAPRGKKKLEAGNTGVTLALD |
| | | ILNELRRCPRELYDVLTTEGRKFFEDETDRTKDAFVPDDALSPYTSADNASETVKRIRWTDRFPQLVMKYVDET |
| | | EFFKNIRFQVRLGKYRFKFYDKLCINGEEDLRGLQKEINGFGRIQEMESARKEKYGDMMQPVESERIRIDDDLEL |
| | | DLLQFAEDSRDSSPYITDSRTAYNINNNRIGLYWNELTVNGRTIPKPGDHLPDLGLTPEGKADVDMPAPMAMLS |
| | | LHELPAMVFYQYLLSQNADPNELKTRSAENLIIGKFNSLRRLFTDISEGRLAPLPEDGLVRVLDDRYGLTLREIPD |
| | | KLTDFLTGKKGADQSKRRRVVAERTLLESLRKAIRRRDRYEEDRKKIGEKDNKYAKKAYSDVRHGSLGRYLSE |
| | | SLIEWQPTLEGGKDKLTGMNFNKLQAELATFNSPEKYTRLRETLSAAGMLSGPIAHPFLRNVTNRKIRNIEELYLI |
| | | YLDQEIGYLKTLLNLGYKGGRRDDRNIDFEASTLKTHVDVRKLPLVKGEKRWEKRTPDYCRELAKRYLEVDGR |
| | | RTSIWLPEGIFSKAITDLLXRHYSGNDGLMDRMRDDSLNNNVAYLINAFFETVLDDHSQPFYMSYDIDKNSGKE |
| | | TPNRFARVYDLFDILNNRKIRNALVKVPMTCNQIAERFTAKNRDGRKRILAEIDDRTAGMTPRDIGSHASLKEAK |
| | | EAMRRRLTHMIGDVKDNERCVRRYKTQDMILFLMASQLLGDAIRMEKIDSLDKFRLSAVCNAGFLNQTMDFEF |
| | | PVQMDGNVIYIRQDNMSLKNYGEFYQLLSDDRLPSLLEKLADGGSDRIDYGNLMGELTSYDLHRSRIFKAVHM |
| | | LERRVTSDRQFRIFLNNPCDRRFYINDDASRMAKRNNFRSLLMLLEQSDTASLTESERNLIISIRNAFSHNHYSIDL |
| | | PRIAPEKRLRKTTLLNKDTRPLGEKKASLTTIATLIAARLEELQKKLESKH |
| 21 | JW13123 | MNFEENGNKYLFGAFLNTAYDNYNEVISHIYDVIRRITSNNPTEQISSSQALVSAEEQTSSDEKDKNKERMSFVC |
| | | TFLITGNATSRKIESMLKRAFPFWDDLIEIQTSMSMQLDKTESIFQVQKNCVEELFTALESWRNYTTHYIHPEAIA |
| | | SPTINLLLKSCFNQGIKEIKKRFNAQDEQLKHLYEAEFSYNRETNKDEVKCYHPANYYKFTDESDLLTDKGLAFF |
| | | TCLFLYKRESYLLLNQLKGFKRADEERYRMTLEAFTVMRFHAPKQLMKLQQQQIDKVSLGISMINELVKCPKEL |
| | | YDCIEDEQKKQFEVYPNAETVPDEQEAIGELIRYKDRYEILMLKALEHSSECKNMGFYLSLGKCYMKCYEKHYI |
| | | DGTTDNRYIVHPLYGFGRLQNASTDHKNHLSSFGEELQTHSQLPVCHFATEDDAADSPTSVPYISESYPSYVLNN |
| | | NNIGIKWLNSSEKTEYPNFNLNEGKVSCPTPDYWLSKYELPAMAFYAYLKEKHKNKLQEYPSIKELIDQSQPENT |
| | | KTSSKTIKSRLEERLKTYKVDAAKKLKRLAEKPDGVQSGRLADELARDILWLQPSSPKEGGKDKLTGANFQALQ |
| | | YALARYGFMRTTLSRIFTTAGLIGSGNAHPFLDKINPQDYSKLTAYYVGYLKQKIVYIDKQLEKLARGKVNIQFH |
| | | PTRKLIKQSQINTIEPEKETVFLPRNIFTEKIEQALCQIQGNFKSNIERAKTSGKGVNASKLIHFYLELYLKDAVTEF |
| | | YNIKRKYSCLCYPLIPSEKYNLKEYQNTEERSERIDRIKDFYNFKEVTKKACKGQELSEDEKKLYKKYIELQKVID |
| | | NEKMIRLRKVQDITLYLWMRLFIEENPERIVFNKNDRPENSLLKLKEMDNTILDHTTARKINIDTPNGNVTIEDEF |
| | | KIKDYGRITTLTTEKLPQSLIKFIGILNKPLDKKDRPSLSYSYIYHETNAFYRYRPEIIKMAQDIENKIINELKIDIQPE |
| | | AEGYYNFRQILEEIKEKSSDINLELLIKIRNAFCHNEYKELDNDQHKYLSSLFKPIADIKQTATLAYLLHMLFETEY |
| | | QKVMILK |
| 22 | JW13124 | MKKKKDSHKADWRDDLISIKHLLVKQEKAKAASAPKKPPAPVALIDLSHMEEQRRELQAEDSSSAKPTKSSAK |
| | | AAGMKSVFLLSDKELLMTSFGRGNDAVREIRVQGDEVQALRDDPAYRIEKADSGFDIHGRTPTKGYTDDPRYA |
| | | AEGPPEHRDLIDCRKALEKMYFGEECEDNIHVQLAYSILDIEKILAVHVNNIVYELNNLLRGKEKYYKDWIGYM |
| | | GKYYTYQEVLRKEFKSKNDEKNLTFVHNMILNVMQDKRRMYFGKILCGPSIAKEDNQEKKKQRYEEEREHAY |
| | | YIFLILGMARQMLAHGDESTRSLLFCFDEEHDCNKTKEVRIKLRQTLDAVYSERVKELNDEFIDTSSKDLVMLCR |
| | | VMHARSPEKKKACVRDYYDFVVRKEYKNQGFSVKRLRETIILRTPQAAVVNDAQYDTVRQKLNRLFDFVIFDH |
| | | YRKHAAEAEQIVASLRAAQSDIDKELIYRHAANNLWQAIGKTVLQDILPMMNGNAIKGIAADPDIKLSMISDIMI |
| | | SDDADYFVKFIYLLTRFQNGKEINDLLTTCINKFENITAFISVMEEQGIFKEFRQEYSMFDNSAAIAKQLREVNSFA |
| | | RMSMKSQDLGLADKLVMFEDAADILGYSDPQAGKQLLDTILNPSQNTGFRNFIASNVVKSNRFHYLACFCNPKT |
| | | VRKLAENRAVIDFVLSEIPDAQILRYYTACTGAKEGADPGEMRAFLAEKLTGITFEEFRNVKQKDRFASPEEKLD |
| | | KVRKQAIIRLYLTALYLLVKNMVYVNSRYFLAFQCLARDNALHGYTDNDIKNDPAAFARRFLSEPRHRKNRRA |
| | | VANIEQNMANSDPWIVREYRNAAMHLSAIRRMPEYIADVKRISSYFELYHYIMQRHLADQHTRKEGEGEEAVK |
| | | NEVVLRYFADVRKYGSYCKDFLWALNVPFAYNLPRYKNLSIENLFDRNRPGTKAGGPTKSAGPTGA |
| 23 | JW13125 | MKIIRSKGQSFTEHSKDESNTDHLERGLEAKRERKLVHSEHKDKTLFHGRELAQYVGEDHALVLRQAISVLDKV |
| | | IRPPRRLRDFELQAYVDRAKLAHELWLLVLNKCKGDFTKHPDSDEVQKIFEKTWSERAHPYTRDRVQPLNPCG |
| | | DENGKYLQSHPKEGVTRQDFEGRWYSALWQENNTTRKPDYATTAQAIIDHLFKQELQFDGQERTKSGHNDDK |
| | | NKNSGTPEPTGKGLVEARGLTIKDSVNDPRMGKQVTKNADLREASKEIDSHYFGKDIAHQICSAFKNRSENDLD |
| | | FNPAGEIGALLYNHLPTALGAANGDEHIKSAIWKRHNQVRQFYQKLLRTNRFKRAFRTRDMDKLDNLLPKDTE |
| | | SLTRVLDAKAENAYLSELIRLGKVIAHAADIPLPPVDGENLQDQFKARLEHFATSAGQSEIKRNETFTRLWRTST |
| | | ALSLRTLTAWVEPILGTNENNNPRNFDITDNNFRGSLNHLLGENTRGDFSWDRIKVIFGQKAYPALCDISDKGRS |
| | | HIFSSGESQNEWQDHQEVVWALVRLATQIRHGTNHFNVRHRLVDEITGGLLTGDNHPQHFHNRPGNIVHSSMLE |
| | | RFDKLLAFDTRLQWQVLLDDLNAFSITKYLNNPQLTTLLQELIKGQTGTDLATPKFMALLRRAANLARAEEKEY |
| | | GEEKMPEESEFLSTNALRRFGPLELTDLSKKKDTSLNDVRIDLFRHLYRTGFPAWLEEKRVDDDYLKNAIRAVF |
| | | DARAFREEAFAEEQRIVAQGTLLESSDVDAISDLSALFATLAANAAGEERLRRNSRARAKTRETVRVQSGGRPD |
| | | TKEKPSWQATLREDIYGHLFAEYLNEEHLSWIWDIKEPHNPIAEDLKLGEIPDLDQSNRENWESQFYTWLYLVPS |
| | | DQVSLLRHQLHKTLALDAAADKSVSGSAADEQDRATLSRMSNLMALYTAVQEAGFDGNEHVEAYGEEADYIF |
| | | YADHDQFKSIHSQDDLTNTVPGTRRGLRQILKFGHLSAVQRIYEKHRVTQAEAEDLIELYGKKRGGEEPQINDFT |
| | | SRSKLHKEIEGLWEKQQPREKHTTDKDIEDKCKAYKTSAIKMALHNFNIASARLTDHADLHHLLIRVVTRLLDFT |
| | | LTWERDRNFLYLGMLCDKLRTIEKDDRGSVLSSTLNLELHHLPYVVKKGKSAEKKRWSICLKIGDRHAQESAEI |
| | | GFSGSDESTIQQALLQEYGLLRLWDDEMGLSLDARDIELDLLPTDHRCLFIKYFVKLAGENEKDVAAREKAPKN |
| | | KPITDHSQRSGAYSYSYKISKKQIRNDFAHFNILTKERLNLTYLTNAVRSLVSYDRKLKNAVSTAIADIVSDAGLE |
| | | IQWTLERDRLKKPLVIPRVVHHLAWLPKINGEDVSFYLPARSARFTSMVKALFDFGTEGNVVEIEKDGTGITGRL |
| | | EYPSALAERYTITKTATDEAGDGGEIPETPAQICLIPSEILTSLENLPQEESKTMIKNRR |
| 24 | JW13126 | MNHTIGKGISYNPFKHQDKHYFGSFFNLADNNIKDVFNEIAQRLNHKDSNPKNIINHYTDKNISLVDFEKFVSLLS |
| | | NYFPIVNEIDQINCDAKGSNGNYKPKTKEERLGYFKKTSYSLLEAIDKLRNYYTHYHHEPIEIDLNLFPFLDHVLL |
| | | KTALNTKKNYLKKGKTKELIKDNLKQQFDFIFNIKVEEYLKEKNPTSKKIERAGGKIENFNKSLVEEITSAIYNDA |
| | | IKDFIYSKGENAELSNRKKTSFSDKDYFYYNDDDHFSLPISSSGIVFLLSCFLNRKEIESLKDNITGYKGKIPNSELT |
| | | LKHNGIRFMTTHRIYSHWCYKGLKTKIRTSEKATRETLLLQMVDELSKVPDVVYQNISDDLKKTFIKDLNEYYID |
| | | NQENQENLYNSKVVHPVIRKRYEDKFNYFAVRFLDEFLDFPTLRFQVHLGNYLEHSTSKNIGNSKTNREIKKKIF |
| | | VFGKLSEVNKLKNDFFEKNKQNDTSWQFFPNPSYHFPMENSNDLKKANKIGIYINHDKSINKFKHQTQKQTHEN |
| | | KIKLIQKVIGDKSKIKIGQPIAYLSMNDIHSILFEALKNPKIKESGKIDGEHIEYKITHQINKQIKEIQNKNENAKIIK |
| | | NQQSKQETDFNIDKLIKDVNKEITISEDKIQTLKENKKQYQNYQRSKKSEKHNNSRKRNHILYNSEKGEIATWLA |
| | | NDIKRFFSKDFKDKWKGHHHSNFQRNLAYYNTQKKEVELLLKGLDYRKTIPMLDFSKNSFLDFYRKYLEKRKQ |
| | | YFKNLLSELKNHKSGKHDSIEKLKKKCFTHFKKRNYRNKTIEDKIQNMLANPIFIKRGFMDTKPTMIPGKNFNQN |
| | | KSDFADWFVAFKEFSEYQKFYDTNLYPIDLSQKSKSATKKINTEIYKQKKNDWAIWQMTKYIFKDIFQQDSQNIS |
| | | LSEIYQSRQEPISNAKNTATDKRKQNSIWDSTIDLQLNRKIKISDVKLKDIGNFRKYENDQRINTFLDYGDFSDW |
| | | MAYLPNNWQENFEYKPINVIDIQLDDYEKIRQNVLLQEVQNLEREIYNNVSNKNEILVQDSKGNKNPNFKAYIL |
| | | KGLLKQIKNLDITNFKLPQNAKEFDTLTFKHLQTLSVIEQKTTLLILLRNKFAHNQLPNKAAYEFCQTILEREKSQ |
| | | TYAHYYSELFKTLKKELTDI* |
| 25 | JW13127 | MENTIEIQKQSIRTLNNAPQYFGLYLNMARLNIFNISNYLAEKFGLAVLDEEEKITISFLGDKGNKEYKTKQSYIY |
| | | FNLIKYMPVAKVFDFEKLPKNEIDKTKNNSGKDFNKLSDTLKVIFKELNEFRNDYSHYFSTEKQDKRKLKISSEL |
| | | KDFLNINFSRALSYTKNRLKDVFSDDDFNIASQTVVVNNDNTITQDGIVFLISMFLDMENAFQFINKIIGLKGTQT |
| | | KAFKAKREVLMTFCVKLPHDKFVSENPQQTFSLELINELNKCPKLLYNVITEEEKQIFKPQIQTEQIENIISNSVPD |
| | | TIDDYENYIESITKKVRYENRFSYFALKYIDLKELFKKWRFQIDLGKVVLDKYSKQLNGKDEVRTVTENAKAFG |
| | | RLQDFYDQEKILNKINIGENKTRFYQFAPHYNFDVQNNKIGISKKETTAKFISKNTTHKVKFNLLQPLPEVFLSIHE |
| | | LPKIILLEYLEQGKTEKLINNFIKLSNSTILNKKFIETIKYKLSDLDVFHKRSMGRKEISAYRKDILKYLIARKEKLN |
| | | QILSEHNLSVKQIPTRILDYWLNIADVQEKTAISDRIKLMKRDCMDRLKAIKKNNAPKIGEMATFLAKDIVDMLIS |
| | | EGKKKKITSFYYDKMQECLVLFADKEKKELFISICSELKLNDADGHPFLKNINLSDIRYTSDLYKIYLQEKADNR |
| | | NQRNRTDTSWLAKNFYTLKNVEVFDKKQQRKIFKLQTIVELPQDKSKIPFTIRQLEKEKSSFNKWLEYITKGKET |
| | | TDKKKPVNLPANLFDDTLKKLLKTELSKNNIQYNKEANYNQLFKIWWKEFRKDNTQNFYTAEREYTFEEEKLN |
| | | FKINTQPKFENYYTRFAENVFNKKQALRNEERKTKRNLPPIQKIHVIKKIRNKIGNTEKEIRMLQEEDRLMLLMFE |
| | | KLTKENLNLKLEKVNELLNERIEIKEKIPGKLSFDDLGEKTITRNIVETRKRKEYSVLQKYIFDRRLPELFEYFNET |
| | | DILIEKIKTELDAYNKAKDIVFDLIFKLEEAIIKKDETGIKELNKDQNGNIQTGNIQHKPYLHWLLKKNMITEKEFT |
| | | FINMVRNTFSHNRFPQKKTMELFIKKWNDNNFAYQILETYKQKTNNIIEKLKDM* |
| 26 | JW13128 | MKKKSNIKIMGVKSVHYFNNDVIIENSLSENVEILFKPNYQKIDELKILNSNTNNQTNNRVEFINDNEKKGFTLKK |
| | | KDSSFEKDKAPKSINSYVNKVKNNSFIHNELFGNKNNNFIPQIYSNFEDIRKIILNYIDHIIYSVNNKIIANKCKIEVD |
| | | RLSFDDIGMLPATKTYEEYGQTPEQRENMTDVVLPAFKEVLKDNNIKTGNYGNIKVDYWNIVKYAYKKSRCQE |
| | | YTIRELSNDSLNYINNNINAIAAYSKKVKDYPLLNELNLDRNKYIIHLERKNENEKTAIKKLNNHFSGEEIFKEIYG |
| | | IEKEFQEKKELYNYLRIISLIRQYCAHFITFDSEEDSIKALINPSNNLIKNFKTSFIKNNEKYLLVLYEYQDFYSELLN |
| | | KKNINKENNIFTEFYNYLIKDEAKNLGISVDKLQKRYVFNLNIEDDTKKAEYLNKMKVLIKFFITLELKYDKDFN |
| | | KNDSSDVNSKFYYIEKIKTAKYANNEDIIKALSDKYSDFSIDDYKDEYDSLYNQSKDKIYDELYEKLNVKIDTDK |
| | | LSDYVIDILGKEENNIIKKFTFDNLKVKYSKIEEEVNEYKKWEKIKNKEKKEIFENQIRDLFPDIFKHINEYNEEYE |
| | | KNFKNKIKLPNISTDSKFFNLIYFVSEFLTTKDANNLFSTILTKLDSISSLLSLLNSYDSNSNIIGNEFIDYKFMLDNK |
| | | EINIENICNFKDDIKILKSLRIKDNTKTSKANINDVDFNNIFNSFNDAGMSLEKFNRKIELTTESQEDDYVANNYKE |
| | | LVKYNALSSYKKSVNELNNKKYNKKTLLDLKDEDLKERINNYLSTLDLFKNYNCDKNYIKLVKEAVNYKKKE |
| | | KPLKQYLRNSIYSSKQYQYIKDYANTRLCKYIIANEKILDYILNDKFDTEGMKKHLYRVYLDYKKEEITKDKIDN |
| | | NYNNVNINELKKALQEINLKTLSDNILKNIPEDRNLKAIIGLYFEVCYIVIKGLYDVNSAYMIQIQEYEKIYKKCFG |
| | | ASNFSFNTELLKKFEEYEKNRNPESKSLKQIKGIIGDGKFGHEYVREETDDDEKKKKALIYIRFRNTVEHSSLLAN |
| | | SDILKNFNEDESFTKNEFKITSMFQLYHILIQRLLKKDSSNNKDKDGNPNPYYPIGSEFEPDKKGYSTKALIIMNLP |
| | | YLYNVARFNNLTIEKYYLRRFEGNVKNKKEPNSSSE* |
| 27 | JW13129 | MGIDYSLTSDCYRGINKSCFAVALNIAYDNCDHKGCRTLLSEVLRSKGGISDEQIKSQVVDGIQKRLKDIRNYFS |
| | | HYYHAEDCLRFGDQDAVKVFLEEIYKNAESKTVGATKESDYKGVVPPLFELHNGTYMITAAGVIFLASFFCHRS |
| | | NVYRMLGAVKGFKHTGKEQLSDGQKRDYGFTRRLLAYYALRDSYSVGAEDKTRCFREILSYLSRVPQLAVDW |
| | | LNEQQLLTPEEKEAFLNQPAEDEGGDISDSSSSDKNKKSKEKRRSLRRDEKFILFAIQFIEGWAAEQGLDVTFARY |
| | | QKTVEKAENKNQDGKQARAVQLKYRNQGLNPDFNNEWMYYIQNEHAIIQIKLNNKKAVAARISENELKYLVL |
| | | LIFEEKGNDAVQKLNCYIYSMSQKIEGEWKHRPEDERWMPSFTKRADRTVTPEAVQSRLSYIRKQLQETIEKIGQ |
| | | EEPRNNKWLIYKGKKISMILKFISDSIRDIQRRPNVKQYHILRDALQRLDFDGFYKELQNYVNDGRIAVSLYDQIK |
| | | GVNDISGLCKKVCELTLERLAGLEAKNGSELRRYIGLEAQEKHPKYGEWNTLQEKAKRFLESQFSIGKNFLRKM |
| | | FYGDCCQKRCFDEEKGYNTQAKERKSLYSIVKEKLKDIKPIHDDRWYLIDRNPKNYDNKHSRIIRQMCNTYIQD |
| | | VLCMKMAMWHYEKLISATEFRNKLEWNCIGQGNMGYERYSLWYKTGCGVVIQFTPADFLRLDIIEKPAMIENI |
| | | CQCFVLGNKKLNSGAEKKITWDKFNKDGIAKYRKRQAEAVRAIFAFEEGLKIQEDKWSHERYFPFCNILDEAVK |
| | | QGKIKDTGKDKEALNRGRNDFFHEEFKSTEDQQAIFQKYFPIVERKDDTKKRRDKKQK* |
| 28 | JW13130 | MENQTQKGKGIYYYYTKNEDKHYFGSFLNLANNNIEQIIEEFRIRLSLKDEKNIKEIINNYFTDKKSYTDWERGIN |
| | | ILKEYLPVIDYLDLAITDKEFEKIDLKQKETAKRKYFRTNFSLLIDTIIDLRNFYTHYFHKPISINPDVAKFLDKNLL |
| | | NVCLDIKKQKMKTDKTKQALKDGLDKELKKLIELKKAELKEKKIKTWNITENVEGAVYNDAFNHMVYKNNAG |
| | | VTILKDYHKSILPDDKIDSELKLNFSISGLVFLLSMFLSKKEIEQFKSNLEGFKGKVIGENGEYEISKFNNSLKYMA |
| | | THWIFSYLTFKGLKQRVKNTFDKETLLMQMIDELNKVPHEVYQTLSKEQQNEFLEDINEYVQDNEENKKSMEN |
| | | SIVVHPVIRKRYDDKFNYFAIRFLDEFANFPTLKFFVTAGNFVHDKREKQIQGSMLTSDRMIKEKINVFGKLTEIA |
| | | KYKSDYFSNENTLETSEWELFPNPSYLLIQNNIPVHIDLIHNTEEAKQCQIAIDRIKCTTNPAKKRNTRKSKEEIIKII |
| | | YQKNKNIKYGDPTALLSSNELPALIYELLVNKKSGKELENIIVEKIVNQYKTIAGFEKGQNLSNSLITKKLKKSEP |
| | | NEDKINAEKIILAINRELEITENKLNIIKNNRAEFRTGAKRKHIFYSKELGQEATWIAYDLKREMPEASRKEWKGF |
| | | HHSELQKFLAFYDRNKNDAKALLNMFWNFDNDQLIGNDLNSAFREFHFDKFYEKYLIKRDEILEGFKSFISNFKD |
| | | EPKLLKKGIKDIYRVFDKRYYIIKSTNAQKEQLLSKPICLPRGIFDNKPTYIEGVKVESNSALFADWYQYTYSDKH |
| | | EFQSFYDMPRDYKEQFEKFELNNIKSIQNKKNLNKSDKFIYFRYKQDLKIKQIKSQDLFIKLMVDELFNVVFKNNI |
| | | ELNLKKLYQTSDERFKNQLIADVQKNREKGDTSDNKMNENFIWNMTIPLSLCNGQIEEPKVKLKDIGKFRKLET |
| | | DDKVIQLLEYDKSKVWKKLEIEDELENMPNSYERIRREKLLKGIQEFEHFLLEKEKFDGINHPKHFEQDLNPNFK |
| | | TYVINGVLRKNSKLNYTEIDKLLDLEHISIKDIETSAKEIHLAYFLIHVRNKFGHNQLPKLEAFELMKKYYKKNNE |
| | | ETYAEYFHKVSSQIVNEFKNSLEKHS* |
| 29 | JW13131 | MNNNILEQSTSGSEKRASTRTLEADPQYFGVYINMARHNVFQIINALTHKFSKQIENAKPINDDENIANDYLINIG |
| | | KGTDKSPTIIEVLNPAHPLHRLYGEHVFRALKRYLPLVTIFEVPSINTEDIIKDTDDILPVLFQDLYEFITLLFYELV |
| | | KFRDAYTHALALDEQGNIVPRKIDLHPNLRHYFEHLFYKAPDYTLRRFRSTQEKIAHGFHEKDFALLKAHNLYQ |
| | | DPHSNELTTQGLFFFTTLFLEQKYAYQFLKRFNGFKNETIQPFKATLRVFTAFTVKLPNDKLASDHPGQSFLLDM |
| | | LNELNKIPQSLFKHLTPKDQEMFERINDEALTNILKNTDEASFKDVDDLLGKMAPLIRREDRFPYFALWFLEQTK |
| | | AFNHIRFQISIGKIAYSPYDKTIIGETSPRIIKFDIHGFGSLAEFSDEDTLLTTLKRQLPAGSPHASLTFSQYAPHYHIK |
| | | NNKIGILVDYPSGDRPLSNITQQPDGKIKVNHIKPTAFISINELPKLVVLALLGTNKDNKPIGNDIERLIRSFITKFKN |
| | | QLFHLAPLTKIKNGLTFSPETFTRRMDKDKMVKGRIPKSELAKREEYKIYLEKRKAVLQGTTDLKLNVNQLPTKI |
| | | QNYLLNIDEVSDEKSIHLRIKTMIKEVEYRLKKIDRNKLPKVGDIATYIARDMLDMVADVRTKSRITSAYYSQIQ |
| | | RALAYFALDKTRLIDLCDELGLFNHQTGHVFLIREIFLNNHHILGVYREYLTKKQNWIDQNLIVKIQERGKRLTK |
| | | YILPTNRPLPYKMKQSINKGFEFNAWLQHKSTMPIDLPTTLFDESLTSLLKKTIAQKLGIASKSEDKFGRLLDRLL |
| | | KQDTQPFYKFERIYRKPFSQEEPEPFNILKLTHTALKQRFGKPAEVNEKIIRHHQRKDQIVRLMCEHLFKNNSELA |
| | | FEGEFLLENLHPASRNNPLDAPMVFEQTIPHTHKKIVAQDSNKWIQEVKKTNNRNKAWYRWTLKDFGTFRKIIH |
| | | DRRLPALVNSITGDEIDFDLVQFELAAYDRARETIFDQLFLLEQFIADKDMSYIKQHKAIERMQDGKGFDEVQFN |
| | | TYADWLSDKGLLTPDEINGLKEIRNRFSHNQWPGISKLGIQPISQEQQSAFVTHLNIKGWVNEHHTPLAMFMEKL |
| | | VINWVSKAIT* |
| 30 | JW13132 | MKIKNENTDKKTELYSIDKYKGRDKWCFAIVLNKAQTNLTENPDLFEQTITKYDRIRKEGWFDEETKKLIYIQEN |
| | | EHKIKGEIKTLAREVLKNLRNYFSHHFYKQDCLIFPKDNIVRIIMGRAYERSEYEIKKNLKEDISIELPALFEPEGKI |
| | | TTAGIVFFTSFFVERRFLHRLMGSVQGFTKTEGEYKITRDVFAKYCLRDSYSVKAQDNDAVMFRDIIGYLSRVPT |
| | | ESFQHIKNPKKQNESQLSERKTDKFISFALKYLKDYGFEDLKGHYTAFFARSEIKKEKEDIEIKDDKKHKPHRMK |
| | | SKIEIHFDKTKEDRFYIERNNVILKIQRKGGRANILRMGIYELKYLVLLCLSGKAREAINRIDDYLNDLRNKIPHIE |
| | | NMNKEGIGEQIRSLPGFVRSQLGFVQIDDEKKKENRLDYVEKKWEKKRAESKELKLNRKGRDILRYINERCKKP |
| | | LTIDRYNRILELLVEKNIEGFYHELEELRKTGRIEKNITQALVGEKNINALHIKICKLVQDELKSLEKEDLKKYIGL |
| | | TPKEEKVVSFEEKLGRILDKPVIYKGFLRYQFFKNDKKSFARLVEEIIKEKTGGLDVPIETEYYSISTLGRFDKANK |
| | | TLYETLAMDRLCMMMARRYFLSLNKILAKRAQNIEWKKESGKEFIVFKFNMPQDTGKSISIRFSPKDYTKLYVK |
| | | NDSEFLARLCQYFFPNEKAIDYHKLYSHGINKYTNFQKEGIEAILELEEKIIKKRKINSPENYLSFEEILNQSIYNDE |
| | | EKNTLIQIRHSLLHYQILFSKNDLTKFYNVMKREGIEKIWSLVI* |
| 31 | JW13133 | MENLSKEQIVETQEQNKRTWGNDPQYFGAYLNMARLNIYNVSNHLAEKFGITAIENEEQISNSFLGDKENKVFK |
| | | NKQNHIFSNLIRYLPIVKVFDFEKLPEEEKISLKDNFGKDFKELSDTLKIIFSEINEFRNDYSHYFSTEKKNKRKTKV |
| | | SDKLKDFLNINYTRAIQYTKNRFINVFSDNDFCLAEEAKLVENDNTITQDGIVFFTSMFLDRENAFQFISKIKGLK |
| | | GTQTKAFKAKREVLMAFCINLPHDKFVSENTEQAFSLELINELNKCPKTLYNVISENEKQHFLPKLEDEQIDNVL |
| | | ENSVPYTIDDYENYIENITKKVRNKNRFSYFALKFIDQKELFKNWKFQIDLGKVVLDEYTKTLQGKDETRTVVE |
| | | NAKAFGKLQHLNDEENVLNKINKSESKTHFEQFAPHYNFDNNKIGISRKEDSAIFISRNTDKKVKFNLKQPLPEAF |
| | | LSIHELPKIILLEYLENGKTEQLINDFIEINNSKILNKKFIESIKSKLTDFNTFNKRSQGRKEKSAYKKEALKYLLDR |
| | | KEKLNQILAEYNLNVKQIPTRILDYWLNVADVQEKTAISDRIKLMKRDCMDRIKAMKKGKAPKIGEMATFIAKD |
| | | IVDMIIGEEKKKKITSFYYDKMQECLALFADKEKKELFIHICNNELKLNESDGHPFLKNIILYDYRYTSDLYRRYL |
| | | EEKADNRNNLNKNDTSWLAKNFYFIEKVEVFDKRLNRMEFKPQTVVKIKDKSKIPFTLRQLEKEKSSFDTWFEN |
| | | ITKGKETTDKKKPVDLPTNLFDNYLKELLIKDLSKNNIKFNPKTNYNELFKLWWKECRKDKTQSFYNAEREYSF |
| | | EDKKLNFKINTKSKFEDYINPEFAEKVFKLKSSRREKENSTGRKLPPLMIKDLEKSMANKIGSIEKDIRILQEDDC |
| | | MMLLMFEKLVDNNLELKLENVDTLMNESIEIKQSILGKLSFDDFGDNVNKNDRIIISKNITETRKRKEYSVLKKYI |
| | | FDRRLPELFEYFETEDITMEKIKLELGTYNKAKDIVFDLIFDLESAIIKKNENRIKELNKDKNGNIQTGNIQHKPYL |
| | | FWLLEKNLITEQEFTFLNMVRNTFSHNQFPQKKTMELFIKNWNKNEYAKQILTVYTEKINNLIEKVIDI* |
| 32 | JW13134 | MAVNYSLREKWYRGVNKCCFTVALNIAVDNCKSKGCETLLKEAEHSKGGITDEQIQQSYTEVEKRLNDIRNYFS |
| | | HFYHGDECLIFKKDDIVKRFMESVFATAVSNVVGGTKESDYKGVVPPLFEQSNEDYMITAAGVIFLASFFCHRSN |
| | | VYRMLGAVKGFKHTGKEELSDGQKRDHGFTHRLLAHYSLRDSYSVKIEETKSFRDLLGYLSRVPQQAVDWLNE |
| | | RNELSEDEKKEFLNQKSSEEESPEQPEPENAEWRTEKTSRRSLRKTEKFILFAAKFIEDRAEKEKQDVTFARYQKT |
| | | VTKEENKNQDGKQARVVRLKYEEDKKDDEKPREHFNLEWMYYIRNEHAIIQIKPKDKEAVAARISENELKYLV |
| | | LLIFEGKGGDAFNKLSDYIFRMTQKIKSGQINPNEARLPSFLKNPVKNITDKMVRNRLDYIRGQIKDVLEKINMEE |
| | | PQNNKWLIYKGKKISLVLKFISDGISDIKKRPNVKEYDTLRDTLQKLDFNRFYERLKSYVSDGRLAAALYDKIKG |
| | | IDDISELCKKVCELMFARLAELEKKGGFELYRYIGMEVQEKDEKYDEWNSPQKKAERFLESQFSIGENFLRESFY |
| | | SEYCQKQECIDKEISLNTSVKNRKSLVYIVKEKLKDIMPLHNDRWYLIDRNPKDFERKDSKVIKGLCNTYVQDV |
| | | LCMKMARWYYGQLNPALKNNIKWDETGQGHGYDRYKLSYRTNFGITIEFKLADFTRLDIIEKSDMIENICRSFIK |
| | | PNRTISWYDFKQDGVEEYRKRQYKAVRAVFAFEESLIIPGRDWLSQGFVPFIKNEEYVKKGFSLFVLDEAVRQL |
| | | KIKGSDKDAMRQVRNDFFHEQFQAKDEQWKVFEGYLSCFMIDRPKGEKNKKRYNGNKK* |
| 33 | JW13135 | MEEKEKISIQTIQDAPYYFSHYANMARHNAFLIVNEINEKVFQRSATKEDELLRESFLVKPPRQQADIIGKIDSLLL |
| | | HHFPFLAYYENKSAGSARVELKKYMDILNQFRNEVTHYKHPVEPKCIVNLQEVFSSAVEKVQERMIAFSEKDFE |
| | | HLKPSSSDYRHYILTEAGINTLTDTGLYFFLCLFLEKKYAYKFLAGIKGFKNNTDHTHKVALEVFTQFCCRLPYS |
| | | KSASSDIALDMLNELNRCPKALYQVIDNEQKELFTVKKEDIVETEQGTEDVPEPVMIRYDDRFPYFALRYFDESE |
| | | ALTDISFQLYLGRKHKKELHRKKLNGEMRTHNLLKEMHVFGKLADYQTEEMTKSFIESKAVEHYAPGYRIVNN |
| | | RIGVLLKAPEKCSLTSSIPQKTNTAPSAILSTHELAALYLYNRLYKQGSADNSPASIIKKYIENFNRFIKDLQSGKS |
| | | QPVESGGFRRMRNSNRDEEERLKLQKAKQELQKQLDVYELKVSYLPDACLEYLLSYKKDNKEFMLKDTFRKM |
| | | WKNADEGLEKIRKKEEQKKEVKQEKLAQELAQDFVYLTPPHKELSENGTEKSVDKKINNMEFDVLKNMLTYFP |
| | | LYKNRLKPYLNILKDTENKWQHPFLHLVLIYDFDSCNSLKDFYVRYYEYKKIWINKFIQQDKRKRWNLVPKQN |
| | | VNDLIKKYDYFLKTTVKFKSAKEKEYSKDAIFLPKGLFDAHIAEAMKKQNYEVKETDNAAYFLKVYFDGKSQN |
| | | YYSLPRYYDASAVGWLTHEARDILKRKIEETWETKNDEEFRNKLKKLSKDIRESETELLHQQTNDRTLFLMVND |
| | | LLSGNTNNYKDIVDLGYNNKSENSILNKLYPIKETIHDKIVTAELPIKRYGEFKRFMKDRRLPDLLGYYGEKEIPL |
| | | KVLETEMETYDRMRKDAIEQIYNFEKLIYDNFESELKKSVDPSALYIDHNHYLNFVKQKFKLETVITEMQSESFR |
| | | ELRNKIEHNQFPPREDWIIDKISQDTTTTIITEKIMNLISTEYKKIWREVESTTSISDME* |
| 34 | JW13136 | MKSPSKNPRSEQAVDYDFFVGGRSKSADLTIYYNVAFDSVVKIKKQISNWPDSRQYAFLAEYLWKAHYLQKNS |
| | | NGYEVQPIDEWIIQALIAKVEAIRNFHSHIWHDHEVLIFEKELKDFVEQKYDEAKAALSAEFPGAMLEYEDLART |
| | | GRMKKFSLFKRVPERKKDFITVEGRIFFLSFFLSTGEMNQLLQQRRGFKRSDMPLFKMKRLLYTFYCHRDGASM |
| | | LDFNHKEQFIDSMDEQQKRDIFKARTAYKLISYLIDYPWYWGSRDSMPLFDEKGEIIRNVGQLKDYLEKNPHLLP |
| | | ELNFHLLDRKIPATGKFNTRKEKENFAKLQDDRYRLGTIAFNYLPIPNYTFHIDFETLHRLVLLQILHHGSKKEVS |
| | | PYQVLELNLRSIVENRVSLYNILCKQDNERTGEDLDFLLDRKNQRLRGGRKLTEFGISYFESIEKGSGAKIRDSIQL |
| | | ANYMRSMDTAWLELPYEGAHKVEIQPLDPEPIMVYQQDFLEGTTQKFRAGNRFMFYVSRYLMDFAGDNWYW |
| | | GMERFEMRKKDQNARSESLIRTKEYLRASDIPLNGDYRLTLDNDHIFLAMPKNGPGKKNHEKFYQFALGPRAM |
| | | RYLGAYIINNRADFVSKAKGFLDTLVRDLDRLHKNEYWNMEHGYELLESPFVSGFLKNVPTNIEKLLTLVKTRIE |
| | | YIKQEWQQALENKPYLSRAQKNKLIMDAYRLLQWPKGNDGNPRFFRAHEYNQMSVCHYSLHLKDNEQDKESR |
| | | KQIKKRFKSKYDHLFEDVFKLNTRKPPIPRSILSLLDEADSLDELMKKTFEECHQLLDNRYSQLKSLPNQQLKREL |
| | | PELCRLLGISVPLNILREQEKKALKEKHNTTLCVKPFDIHPMLVVKYFFPEQYKASKSVEFVNKNGEKVKKQPTL |
| | | TIFSALRKNRALREKLVEDFYDEQNSAVLYPDDDTKKQKEVLTGLMNTTCTEDILLWWMANEYLVNNPYTQA |
| | | MGELLMKKPRSGRQYIGDLHKLTILQPLPKESGKRQIYMSILMHQLDDLMFIVQKSRLGKAAEHFVQRCSTENGI |
| | | WAPEIEKLSTNQLAGAPFPDGTINNPIPFQLLLDEIELVRRTGLELGRYLLEFEKKILQQALNGYESKEAFHKWLK |
| | | NEYEKTEYYGKYPAYFFNFDSILKLSGTVDNNIDKDLNITLSDYRNITFHNDIPSNGSFSWLTREGSSVRQLLGIE |
| | | KNLHEKRDRSEYENNREE* |
| 35 | JW13137 | MEKEQGLYSIDRYQGAGKWCFAIGANRAWDNYNERPKLFSESLLRYEKATRRDWFDEETRGLIKKSDVRQRLR |
| | | KIRCYFSHYCHDNTCLGFDPDDDLRKIMEKAYERAIFEQRKHLSTETDIETPALFEPHGRITAAGVVFFCSFFVER |
| | | RILNRLMGRIPGFKKTEGEYGATRQMFSKYCLRDSYSIRASDSNAVLFRDILGYLSRAPSQYYRHNKDQCDKDG |
| | | HPERKKDKFINLALRYLESFVPARLRNHTLSVGRKEVVRMETNAVAEGEGEYRPYPPKAKVKVVFTEDDPERPY |
| | | YITHNTVILQTAKKEEDIHHCKVGVNELKYLVLLCLQGKAEKAVAGIEGYVRRIQGRFADHTNKVARDDDERL |
| | | VRGLPEFVRVASGIETPDEVRELKSRLDHIRKKWQTKKAESAEAQLHRKARDVLRHINWESQRPLGIEQYNRLL |
| | | ELLVNRDLESFAAEMKELKRRGLISEELLKSVEGIRNLNTLHVKVCNLVLTRLEHLVENDPEELKRHIGIVPREEK |
| | | EGPSYEEKVRAFVQQPMMYRGFLRNSFFKGSGKSFAKLVEEELHKKGCPDVPLGTDYYLVRDLERDERKNRFH |
| | | NDNAALYETLALDRLCVLMARDCLVRLNRNLEKHATRISWEATDAGDTICLELPRRDRDHESFRLSFGVRDYP |
| | | KLYVMDDPVFLCGLMKHFFPDNQAIQYHELYSEGINKYTAMQAEGIAATLKLEEKTIKEKNMQIPATGYIRFCEI |
| | | VSQSDFAPGEKRVLKNVRNGLLHYHLEFEPTEWAEFREIMKREGFDTAKKRKSTRKK* |
| 36 | JW13138 | METQENELFENRRRTLADDPQYFGAYLNLARLNIFSINNYLAKEFQQTELRDDELIQNGFICIPSQKNRNDNKLFE |
| | | RLIRLMPVIKQFDAARLPNEEQKSGQAEGKDIKTMAKTLKALFKDMQEFRNDYTHFYATDKQECRKLTVSSET |
| | | ATFLKASFARAIEYSKVRFKDVLAEDDYSLVAGKELVEDENTITTEGLVFFTALFLDRENAFQFIGKVQGLKGTQ |
| | | FKSFIATREVLMAYCVRLPHDKLISDNPIQALLFDILNELNKCPKKLYNVLSEEVKKEFRPELSESGIENMLANSF |
| | | NDEEREKLLDEIEYKEYIEQLTIRVRHSNRFHYFAMRFIDEQELWPGIRFQIDLGKYTLTQYDKQVLGESIPRSVV |
| | | ENTRAFGRLSNFLTADPDSLEQRIDVDHRANGFEQFAPHYNADINKIGIAFTEKEQLPYVVPTKNAETNRVKYSF |
| | | KQPQPDAFISLHELAKAILLEQLQPGESEKLIRAFCSTAENKLFNLEFIESIKWKLPDWKPFQKQCDTKKSRAYITK |
| | | KKMFAYAPRDRKKLLDELLAPYGLNWKQVPERILNYWLNIEEVHDARSIKERILLMKRDGLKRLKQLEKHRKD |
| | | PSIRIPKVGEMATFLARDIVDMMIDKTKKQKITSIYYDKMQECLAFYADAEKKRQFIGLVRELNLNAPDGHPFLK |
| | | NLNLESIRKTSEFYKLYLMEKVEKMIENGYKSNGDKRFKNIAWIIRVFEEKQKNEKNGKDDTIYRIPNNRNDIPY |
| | | TIRQWEKETSTLEEWLHTINHGKQEGDRKRPIDLPTDLFDARLCELMKGQMQENGQTFADTAKYNELLKQWW |
| | | SLREDETQPFYNGARHYVIKEEAVCFMPGAQPRLTSCYADAVEEAYNRLSAERNIARRHNKQLPLIQKQKVEKV |
| | | FKHTLYDTEREIRLLGEQDRILLLMAEQLTPGRETLKLKTVSEELTRPREIKKEFPYISNYNAQGEKLPKDEPKPKI |
| | | KVTVTGIMQLKNSNDLNRFAHDRRMPELVAYLPNATIDADTLRYELMDYNKARLTVFDAVFRLEKAIIDQDRE |
| | | GVITLFTDEQGEAKQGRMQHKPYLQWLLNKGIITQPESSYLNMLRNSFSHNQVPHIAVALNGTEVVPVKNIASTI |
| | | AGAYKQKIETIIGKIG* |
| 37 | JW13139 | MKKELNREDVFTGGKTPELTIYYNIAYFRMAGLINALCGNKLERDKDALEQFMKAFINGKQKLTDMQFVKLCD |
| | | YLWKGYKYDKNRSEYSLTENDKTMVLKMVAKLQDIRNFQSHIWHDNKVLVFDADLVQFIKNKHLEAIDAQRQ |
| | | RFSKETEVYEKENRELKKKKNKELLFDIHDGLGYITGEGRNFFLSFFLTRGEMTRFLKQRKGCKRDDTPEYKIKH |
| | | LVYRHFTHRDGATRTHYGYEDNMLDQLPDKQEFLTTRHTYRLINYLNDIPEEVTNPELFPLFNTISNGILIKESVG |
| | | TYIAFINKMPLLSDFEFSEVWGKDGKPYTNLVEFYHKTQPGFKFRTDLNSFHKIILNLIRDENYTGFFTTQLNLFM |
| | | AHREELILVISKPLITPNDLLLIEEHYRYKLKANDFVREKLGEWKEKIEKGKWEKANEQKDKLINLLGGVIEITFY |
| | | DFYWQKDEKPRNENRFMEFAIRFMADFNLLPDCEWEVEPLQIENDLIANRTATPDLKKSGSQFMNQLTDNYRL |
| | | KFNDGQIAFRYQNQVFIMGHKAVKNLLIACFDGKEKMLNGFMPALLADLKKITNEHILKNHQALNTLSLLNNDS |
| | | IPSYISRQWGEAEPITDMKKKAIARMDYITQQFEALIENHHYLNRADKNRQIMRCYKFFEWQYPQNSQFKFLRR |
| | | NEYHRMSIYHYCLDKEQHKYDKKGHNYLYNRLIKESHNESGNIEQHLPYQIRTMLNDAKDFNDYFLRILNATH |
| | | KILTDWKNQLKQGREPNNYYLSRLGFTGGLTQKVVHTRLLPFSIHPGIPVSFFYRTEMNQNPSFNLSAKVWNSES |
| | | PFRVGLKESNYQYAKYLGLFNEIKTQRKIIGKMNQLIAEDALLWQIAKKYLDKCHPKFSEIINQQVNGKQPLNVK |
| | | AIHDTELTIDFPVDKNLYQVVVKMKQLDDFMFIDSKPVLEKTIRYMIKNSLRDKEYQQRVFIETNPGVFKIPYNE |
| | | VVEAMRTINHQALTWARLLLDWESKTVKTIPEADKKAKLQEAYNKRQPAFFNFNDICRYADDGKQLKDLRNK |
| | | TFHTEVPETWTYDEMRENKTIKMVLGINETTFLKKDYAIENARTIE* |
| 38 | JW13140 | MRKNYQTKPKAPISTDQLFTGAKTPEYAVFYNIAYWWMSEMLKRLYKNTDTSIHEDTSPFIQRFVNDGEEINSSI |
| | | FSDADYIKLRDYLWKGYLFDKNKSGSIITFKDKVIIHKIIAKLAEIRNFHSHYWHDNSILKCDEDLKSWIDFLHNY |
| | | AVDKLRVEYSKEIERYESNRDNLFDMHGSDYFITQEGRNFFLSFFLKKSEMSRFMQQRKGCKRNDKPEFMIKHQ |
| | | VYRYYTHRDGASRNRYSIEETVFSALDPDSKSEINKARQVYKMLAYLNDIPSEVIDKKLFPLLLNDEIVEDSTQII |
| | | KFIKKHNLFSNCKFGIIEDSKGEVIQKEVLFSYVDSKYNFRIRIAALHKLILDIIRNSKREEEFYNTLKTFGDFRDQF |
| | | PIILDDIKKGIGNIEELNEYYIFKLKADDKTRGLLGKVIDDYNKNQFIKLKDYNELKEKSVDEPIQLIYHNFYFESG |
| | | QKPRSGNQFMEFAVKYLMDKNLVPNWEWLLEKYESEEVEKKLENNNPKKVVKHIKAYFSYIPDGYRLHFKED |
| | | HVLLRLKYESEIIIEVGENAMKNLLITHFHGKPINEVVEKTVSDINKIKHVAKNNKTLTEKLELLNDKTIPRYLKL |
| | | MMHDESVMQNETINYSIIQAKNRIDRLIEYFEDLHSDKVKLNRREINIQLIRCYKYFDWNYPNNSEYKFLRQNEY |
| | | QLMSIYHYTLAKPKNAKHHLLILRKELFGDINKHLPTNLKLILEEATSIDELFKTVLLETISRLNKWKNRFSSMNS |
| | | NQKKDCLSKLGIHIPKIPVPDASNKANLGQMKNLPFMLHPSLVFMTFKYSRSSTIFSEYRDNPKNSKGLLMDHYN |
| | | FQSYLDLHSVLIDQKQAHKIVGTINNLKTLDTLIWQMTKKYLDDTTSDILKNITNELINSSTENFNVNQLHNFEFPI |
| | | FKSDKSEVKPFKVIVKFKQLADFMLITEKPLKNVALQLFKRYQTNEELEKLEVYFKNGFYEIPYVQIKQEMDRIY |
| | | RESLILADFILDWEKSIVDKIPEIEKQKLIESAKQNTNGYKAYINFDTVCNYAGLIKEEQSELQNLRNHALHAKIPD |
| | | KDWTYKQKLNDNRIQKMLYITLEKLEKYEKKNAYYESKVLHNTY* |
| 39 | JW13141 | MEKSKLDNEMTFAEDAYYFAHYANMARHNAYLILNHINKSIFGNESTLKEENLQIAIIKILDPKNGADHHAKAIK |
| | | LLNHHFPFIACYYKEDIKKAVENSAYKEMNDKKLDHLKEPLTLKQILKTLTGIRNELNHYGYSRKEHPIPFFQDL |
| | | FNDSIQLAKKRMIEFNETRFNSIQDSPYHKMVDPKDSVLTDTGKLFFLCLFLDKKNAFEMLAKVKGFKNRTDEK |
| | | YRATLECYTQLCCKTPYPKLESSDISLDILNELNRCPNALYQVLSEEDKLKFKKEPNEETAEELNPIMKRYDDRS |
| | | AYLALRYFDRTKCLDNITFHLQLGRKVMGEPHKKVFDGKERTHQILKEMRVHDKLSTYETEEAQTFFQSKIESN |
| | | EVELFAPHYRMVGNRIGLSFGTPSEKKEGYSIPINNQPAPQAILSTSELGALYIYNRLYKENKITQSPKNLMSTYL |
| | | QTMNRFIKDWKNDGIKPETSSNKIIKERNQERTKQTINELKRRTDHLQKLLDEKYAGLKVKHLPDICREHLLNYQ |
| | | SDDNIQQAIDFLKKTLSDTNFKKKQLEQFERNMVYRSSNSKQLKIGEIAQELARDIVFFLKPIKKEITNRNKEKVT |
| | | VFQKINNQDFDILQNRLAYFSLYKEELCSFFDDLLKKKHMKHPFLENVKAETKWSNGLIEFYLKYLEHKLKWLN |
| | | TYTKNAPNNTTRPNYTTSNRINKNRSTPNKKDEIEEKEIDPEKIKETFIEKYNYFLKVKTSSPKNYQGKAIFIPVGL |
| | | FNDAITKAMKESGYQVEDDEKTPNAAYWIKSYFHGATQPFYQLPRYYNRAKKDEERDLVEAALLKKEIKNYYV |
| | | KANKKTQNDFKQLAKRIRKQEEEILTQQTSDRVLFMMATDLLNGGSDGRQTIECEQINTLGFNLGENKILDENR |
| | | KVSMNIYGRKVVSELPIKRYGEFRRFMKDRRLENLINYFPEGKDIELGVLKSGEVEAVGERFSSSTLANELEFFDS |
| | | QRWLLMKSIYEFEKKIYTHFFDVLTKNVPEKEMMENNYIAHYHYIECAKKLELSVSELEKDDFKELRNKIQHNEI |
| | | PYSQWIKNRISTKDGHLITKQIVELVLSIYQQMNNELDQLIRK* |
| 40 | JW13142 | MKTNPLIASSGEKPNYKKFNTESDKSFKKIFQNKGSIAPIAEKACKNFEIKSKSPVNRDGRLHYFSVGHAFKNIDS |
| | | KNVFRYELDESQMDMKPTQFLALQKEFFDFQGALNGLLKHIRNVNSHYVHTFEKLEIQSINQKLITFLIEAFELA |
| | | VIHSYLNEEELSYEAYKDDPQSGQKLVQFLCDKFYPNKEHEVEERKTILAKNKRQALEHLLFIEVTSDIDWKLFE |
| | | KHKVFTISNGKYLSFHACLFLLSLFLYKSEANQLISKIKGFKRNDDNQYRSKRQIFTFFSKKFTSQDVNSEEQHLV |
| | | KFRDVIQYLNHYPSAWNKHLELKSGYPQMTDKLMRYIVEAEIYRSFPDQTDNHRFLLFAIREFFGQSCLDTWTG |
| | | NTPINFSNQEQKGFSYEINTSAEIKDIETKLKALVLKGPLNFKEKKEQNRLEKDLRREKKEQPTNRVKEKLLTRIQ |
| | | HNMLYVSYGRNQDRFMDFAARFLAETDYFGKDAKFKMYQFYTSDEQRDHLKEQKKELPKKEFEKLKYHQSKL |
| | | VDYFTYAEQQARYPDWDTPFVVENNAIQIKVTLFNGAKKIVSVQRNLMLYLLEDALYSEKRENAGKGLISGYF |
| | | VHHQKELKDQLDILEKETEISREQKREFKKLLPKRLLHRYSPAQINDTTEWNPMEVILEEAKAQEQRYQLLLEKA |
| | | ILHQTEEDFLKRNKGKQFKLRFVRKAWHLMYLKELYMNKVAEHGHHKSFHITKEEFNDFCRWMFAFDEVPKY |
| | | KEYLCDYFSQKGFFNNAEFKDLIESSTSLNDLYEKTKQRFEGWSKDLTKQSDENKYLLANYESMLKDDMLYVN |
| | | ISHFISYLESKGKINRNAHGHIAYKALNNVPHLIEEYYYKDRLAPEEYKSHGKLYNKLKTVKLEDALLYEMAMH |
| | | YLSLEPALVPKVKTKVKDILSSNIAFDIKDAAGHHLYHLLIPFHKIDSFVALINHQSQQEKDPDKTSFLAKIQPYLE |
| | | KVKNSKDLKAVYHYYKDTPHTLRYEDLNMIHSHIVSQSVQFTKVALKLEEYFIAKKSITLQIARQISYSEIADLSN |
| | | YFTDEVRNTAFHFDVPETAYSMILQGIESEFLDREIKPQKPKSLSELSTQQVSVCTAFLETLHNNLFDRKDDKKER |
| | | LSKARERYFEQIN* |
| 41 | JW13143 | MPXXNNQKKKADSIKRXSPSPSRINGVAKPRPLVVDENNKHVLGGYFGLGLNNFYKATLSIFARTGIKIASKNGT |
| | | VLYPEEKIGQVIRVLRRSISDTSGNLTHEEKVWSNAFKLSSSQEMRLQKLIFHHFPILGPIMADEGAYKASTNKKS |
| | | KVTDAYSMTYGVTLEECLDVLGDLAQTLVDCRNSYTHFYPYNSKESTADQLALQSKTARYLDKVFTASRRLDK |
| | | DRNNIDTAMMEFITGSARNLRQYVERYGFYPKYDETVTYEKDTRGRERMKKKMTERDDFFYKIGNEKECDGK |
| | | RYTVLSGFGLSFFCAVFLSKTQTRNMLADIRLFETSPYPKELDDIIRDMMSIYRIRAPRGKKKLEAGNTGVTLALD |
| | | ILNELRRCPRELYDVLTTEGRKFFEDETDRTKDAFVPDDALSPYTSADNASETVKRIRWTDRFPQLVMKYVDET |
| | | EFFKNIRFQVRLGKYRFKFYDKLCINGEEDLRGLQKEINGFGRIQEMESARKEKYGDMMQPVESERIRIDDDLEL |
| | | DLLQFAEDSRDSSPYITDSRTAYNINNNRIGLYWNELTVNGRTIPKPGDHLPDLGLTPEGKADVDMPAPMAMLS |
| | | LHELPAMVFYQYLLSQNADPNELKTRSAENLIIGKFNSLRRLFTDISEGRLAPLPEDGLVRVLDDRYGLTLREIPD |
| | | KLTDFLTGKKGADQSKRRRVVAERTLLESLRKAIRRRDRYEEDRKKIGEKDNKYAKKAYSDVRHGSLGRYLSE |
| | | SLIEWQPTLEGGKDKLTGMNFNKLQAELATFNSPEKYTRLRETLSAAGMLSGPIAHPFLRNVTNRKIRNIEELYLI |
| | | YLDQEIGYLKTLLNLGYKGGRRDDRNIDFEASTLKTHVDVRKLPLVKGEKRWEKRTPDYCRELAKRYLEVDGR |
| | | RTSIWLPEGIFSKAITDLLXRHYSGNDGLMDRMRDDSLNNNVAYLINAFFETVLDDHSQPFYMSYDIDKNSGKE |
| | | TPNRFARVYDLFDILNNRKIRNALVKVPMTCNQIAERFTAKNRDGRKRILAEIDDRTAGMTPRDIGSHASLKEAK |
| | | EAMRRRLTHMIGDVKDNERCVRRYKTQDMILFLMASQLLGDAIRMEKIDSLDKFRLSAVCNAGFLNQTMDFEF |
| | | PVQMDGNVIYIRQDNMSLKNYGEFYQLLSDDRLPSLLEKLADGGSDRIDYGNLMGELTSYDLHRSRIFKAVHM |
| | | LERRVTSDRQFRIFLNNPCDRRFYINDDASRMAKRNNFRSLLMLLEQSDTASLTESERNLIISIRNAFSHNHYSIDL |
| | | PRIAPEKRLRKTTLLNKDTRPLGEKKASLTTIATLIAARLEELQKKLESKH* |
| 42 | JW13144 | MKTNQPKTIYYNWKDKADFAYFAFYTSQALNNTSIILKNISEIIENKVDKTNDDNQLFSNAQVIKILESNNSVAQ |
| | | KSVINLLDSNLPFSVKSISDPFLVKNRLSYFLWLLKNFRNEYAHYHERELDSRTTLDREEDFKKRENLNKRFSKY |
| | | DFADELLKLKKSAVEELEKRLKINNKELESDSVYKSFKNRFLKISSRQNFTEEDFIFFLCLFLSTKETMQLLNGIKG |
| | | KKNTTTEEFQWIRRVFTIFNAKRFQNKIKSDNPKEAFILNIVNDLAKIPIHLKKYLTEEAKEKLIYTVQETEDEEGN |
| | | ILEQKSEAVTKHDKMFSYRCLQYLELFGFAKNINFNINLGKVFINKPYKKTIINDEYDRFLDKEIHTFGKLKDFDD |
| | | SYFEGYIERKETENGVVTTFKQPLKFYSPKYHFSNNRIGIKLYNKNLKLELKEYDEDGKFVVINNQPDYFLSENAI |
| | | PYFTYCMINFGEDKTLGVIKNFETNFKRFLNDVSIGKSIKVQEIEQNYSLKIGWIPSLIRDNLFHDNDKTFEDVVKE |
| | | KINSLKEETQKLIENNNKKPEDRDRNIKFSFKKGDLATFVAKDIIYFMELKEEIVNGKKVVSKLSSIEYDVLQSKL |
| | | AFYGKHEEDLKLLFKKWNLNERHPFLKDVSMEKVEDRRGFKRQIGIKKFFKNYIYQRKYWLNDLKLEINKENY |
| | | HFVDDYKVCKNDTQIKAYASNLLNHTIYLPNDLFSDLILENSNFAVEKANTNFLISKNLEYFGNQWFYNKENYQ |
| | | QGLDTYQSHLRDKQIRKAITLDRLYWNMLKINTQIPEFSQIFEQNNLAAYNSEQTLLEKQIRMSSNFKLAKEDFR |
| | | YLDFDRDFEIKIEGYRKIKDFGIFRHLIKDRRVPSILAFYTKYKKLGSINEEIIRNEILDFEYYKISILKRVLEIDKQIY |
| | | NNLIGKNISIHEKFSENVNKLYLENQKLANKIIEIRNKLLHNKVPEINLENIQKTFSETLFLEMEKSCNELERLI* |
| 43 | JW13145 | MNFEENGNKYLFGAFLNTAYDNYNEVISHIYDVIRRITSNNPTEQISSSQALVSAEEQTSSDEKDKNKERMSFVC |
| | | TFLITGNATSRKIESMLKRAFPFWDDLIEIQTSMSMQLDKTESIFQVQKNCVEELFTALESWRNYTTHYIHPEAIA |
| | | SPTINLLLKSCFNQGIKEIKKRFNAQDEQLKHLYEAEFSYNRETNKDEVKCYHPANYYKFTDESDLLTDKGLAFF |
| | | TCLFLYKRESYLLLNQLKGFKRADEERYRMTLEAFTVMRFHAPKQLMKLQQQQIDKVSLGISMINELVKCPKEL |
| | | YDCIEDEQKKQFEVYPNAETVPDEQEAIGELIRYKDRYEILMLKALEHSSECKNMGFYLSLGKCYMKCYEKHYI |
| | | DGTTDNRYIVHPLYGFGRLQNASTDHKNHLSSFGEELQTHSQLPVCHFATEDDAADSPTSVPYISESYPSYVLNN |
| | | NNIGIKWLNSSEKTEYPNFNLNEGKVSCPTPDYWLSKYELPAMAFYAYLKEKHKNKLQEYPSIKELIDQSQPENT |
| | | KTSSKTIKSRLEERLKTYKVDAAKKLKRLAEKPDGVQSGRLADELARDILWLQPSSPKEGGKDKLTGANFQALQ |
| | | YALARYGFMRTTLSRIFTTAGLIGSGNAHPFLDKINPQDYSKLTAYYVGYLKQKIVYIDKQLEKLARGKVNIQFH |
| | | PTRKLIKQSQINTIEPEKETVFLPRNIFTEKIEQALCQIQGNFKSNIERAKTSGKGVNASKLIHFYLELYLKDAVTEF |
| | | YNIKRKYSCLCYPLIPSEKYNLKEYQNTEERSERIDRIKDFYNFKEVTKKACKGQELSEDEKKLYKKYIELQKVID |
| | | NEKMIRLRKVQDITLYLWMRLFIEENPERIVFNKNDRPENSLLKLKEMDNTILDHTTARKINIDTPNGNVTIEDEF |
| | | KIKDYGRITTLTTEKLPQSLIKFIGILNKPLDKKDRPSLSYSYIYHETNAFYRYRPEIIKMAQDIENKIINELKIDIQPE |
| | | AEGYYNFRQILEEIKEKSSDINLELLIKIRNAFCHNEYKELDNDQHKYLSSLFKPIADIKQTATLAYLLHMLFETEY |
| | | QKVMILK* |
| 44 | JW13146 | MSIMNIITVLNHIHQIAGLKRNELGDDDNIYSHPVLKYIAPENNSTTLPEKRDLIKELLLEYLPFLEAMKDCYKEV |
| | | KVEKDKRNNKYVKDKKQVFIRNYSDIYCIYWTLYNIFSTLINYRDKSCHYRFIPSKDQEEYSKRTEYDTVRIINK |
| | | YYTYALRKTKEKYGYTTEQLSFIQNNRYTDDKKVNFNFFLSMQSSNNNLSHVGVAQLICLFLQKKDVDNFLEN |
| | | LPIYDNRYCLGIDEHMIIKRSLALHSIKLPKERLNSEKKDMAIAMDMLNELKRCPKELFNTLPFDKQERFRIISSDH |
| | | KEVLLMRSTDRFVPLILQYIDCNKKFKDIRFHVNMGKLRYLFSPNKLCIDNQERVRMLEHLLNGYGRIDEVEYL |
| | | RKAPNGTFGNTNIPIKGFGEIERDSADSNNYPYIVDTHTHYILNNNKVEFCFCEDSKNKNVFPTIEKEINGKWYVE |
| | | KTAPHCRISFFEIPAMAFHMFLCGSEKTEKLIKDVYNNYISLFNALKNGALTEENYKDFNIPECDMPKKILDFLKG |
| | | KAEGKSIDGYVKNILKKELKDTRKRIEQAPSEKDQMPSKRNKIGTKSYKRVLTGKLADFLAKDIVKYQPTLCAG |
| | | DDYGIDRMTGMNYRIMQATIATYNDDDDFDTFYNVFKMAGLVDGDERKNHPFLKKVLLSKPQNTVAFNIKYL |
| | | KEKEIYLRNIEKKNIIPPFVNRERNKWCERDCEYYRILGENLLDLPIELPRQMFYKDIRAQLEPLMPEIDFSQTNTT |
| | | YLIAEYLKRVRGDDFQEFYSWERNYRYIDFLKCIRDDNGRICAQYTTTEERESLWEDSKNRTAEYKRSEEQKNE |
| | | KKDKNFEDSLEERISSSHIKFQNTEKHIRRYKVQDALLFMIAEKQFGKYLDDIKAKNFKLKDIMPDTDKGILSET |
| | | MPIDFTFTKKNIKYNIHAKNLKFKEYGDLFILANDKRLESLWKILATDTVNKEEISEEFAKYDFCRPDITKLVLDF |
| | | EKDVLEKYPEIIEEAEKEYKKFDFKFILDWLINKKKLNYGIRNKLLLIRNAFNHNSYPDKKYAEVRELPEIATNLK |
| | | KTFDENAKKYE* |
| 45 | JW13147 | MFDNEQKNLEKEPYWGVFLNQARLNAYIALRDISERLEENAADEDSLSEWPVLKYLDNDTDAVKSRRIFDLVE |
| | | KHFSMLKIIYGGEKEGDLVKRSKEYKIILKCLFRALNFYRNKFCHMYSGNRARKYNEKELIKYLEDCFDASVRKI |
| | | KELRRLDEKDVLHLRRKIAEGKDANKRVIDNPQFRYPFKNEKGELNEKGLYFLASIFLDKKEAHEFLKKQEYFK |
| | | NDSEPKYRATLESFYHYRIKLPRPVIESDVDKNGLALDMLNELKKCPKELFDLLSKEQQEKFRVVDSEDADEEG |
| | | NEILMRRYSDRFPYLALRYCDENQVFERIRFQIDLGRYYFKFYPKETIDGKTQQRSLDKRLKIFGRIKDVKSKVEQ |
| | | EWSGIIKSPDTIEENPNEPYKLKTTPRYNIVDNQIGFVITGDKNLPDVKRPDGRIELEKPDGWLSIYELPGMLFHGL |
| | | KYGFDKTERMIKIYIEKQRKICKEICEKGTITPDDGESMPEALKGGAKAAKRNYSEKKLERMLQDTEQRIRAIQT |
| | | TQKRMDEPGNKPGKKKFFDIRAGKLADFLARDIMALQRFDPAKHGKDKLTAINFQVLQATLAFYGAKKDVIED |
| | | MFKGIGLLEGDNPHPFLNQIDPAQYNSIAGFYQAYLQKKRSYLEDYRKEEEYDEQFLRPKRQRYAQEKREIKTV |
| | | ARQLLDNPVNVPKNFFKKEIEEFVFSQDPSLKKSKMNTAYMIQALFEKHYGRQQPFYSYNRTYPVVSKAIEYGK |
| | | KGKNKKIAKVLMAIEPKLNYMEIKKIVNEMPDGQYEPENLKRNLYEGYKDYEKDERIIRRCKVQDVVSFMMVE |
| | | ETLKDQLDFNGNVLTLEKITPWEASPFKKPVLCHTIISIPFNTKGGHTDKDYVDFIKNNFEGSYDCEPNKIILKYK |
| | | VTSKDTKLKDIGKYRMYSHDRRLPGLLIWKYRPNDQNGNEIKFTEIEQEIKAFERRRIEIAQCLYTLEKKVIDSWF |
| | | TQDELGEEHIPFNKVIDVIKAKMPNFEDKCNVLLKIRNAINHNQFPVYEQAIQTAPGKEIAGKMLRITESYIEQIM |
| | | AKIDPDFGRTEDAESSR* |
| 46 | JW13148 | MIKKPANRFALPKVIISEVDSENILEFKVKYEKLARLDRFEVEAMHYDEKNEIIFDEVKVNDGLIEIVYKENNKKL |
| | | VVEIEGKAYEISGQKIGGKQRLLENRVSKTKVQLELMNHIEDGEGNKRVSRTERELIVLGDIKLYSQIVGREVKT |
| | | TKEIYLIKRFLEYRSDLLFYYGFVDNFFKVVGNEKELWKIDFNTSHSEQLIEYIKYTFNDNLKNDRQYLNEYVTN |
| | | DVQIQKDFNKVKNVFSELRHALLHFNYDFFQKLFNGQDVGFDLDIEFLNLFIDNIDKLNIETKKEFIGDEKIRLFG |
| | | ENLSLAKVYELYSHICVNRVGFNKFINSMLIKDGIENEALKDKFSTKFTGNAYYIDIHNSREYKDLYKKHKRLVI |
| | | NVSTLKDGRAIRQENKKIAELKKQMTTMTTTNSLARLECKLRLAFGFLYNEYNDYKAFKNSFDSNLKNNQFDV |
| | | SNVDTSKAYFLSTYENRKPRTRERIDKVLKEIESLELKGLIANDPLLKFILLMFVFMPQALKGEFLGFVKKYYHD |
| | | VHSIEKDTKDKEEDLIEFMPLSLKLKILGRNIRTLTLFKYALGSPINYNSTDEVFYVEGNRYGKVYKQLGISHNQE |
| | | EFDKTLTVSLLRYYSALFKLVNDFEIYSLAKGNPTVVNLDVLVDDSSSPYKFRGFYNFGNMIGQIHGLTHNQIKN |
| | | EEIMIRNKIAHFDIEMLLKKPLLAQIKLDVQRKNLIKFIEDRGDMKSVLGYDAINDFSMKMVHLRTKIKVNSDKL |
| | | QIMMGLLTNVKTPNDFYNIYKVKGIESINQHLLDVIGVTESEKKIEKEINEGNKRAVK* |
| 47 | JW13149 | MMETIKQEIGKEYNPFKTEDKHYFGGFFNLADNNIKEAFNEVSIRLSQKGASPKTLIEKYTKENVSLVDYERFVIL |
| | | LSDYFPIIKEIDQINKDEKDNKGILIPKTKNDRIKDFEVILVSMIDAIENLRNYYTHFYHESIEIDNKMFYFLDKVLF |
| | | KTVLDTKRNYLKEDKTKEMIKNTLKEDFNKIFNLKVDEYLTKDNLTSKKIKKARKYGNSFDIGLTKEITASIYND |
| | | AIKYFTYDKNEKSILSDSRKTAFNERDYFYRDKNFDLPISSSGIIFLLSCFLNRKEIEDLKSNIKGYKGKVTKNEEPT |
| | | LEKNSIRFMTTHRIYSIWHYKGLKNKIKTSESATKETLLMQMIDEVSKVPNVVYQNLSKDLKDSFIEDWNEYYK |
| | | HNEENTENTINSKVIHSIVRRRYKDKFNYFAIRFLDEFVNFPSLRFQVYLGNYLVDSRPKESANVITEREIKKKIFV |
| | | FGKLNEVNQLKNDFFSKIEEDKLETNLEVFPNPSYHFPMENSEELKSANKIGIYLSDIENLLEPFKKHLNKNTSQE |
| | | KISLIEDITQQNENIKIGQPLAYLSMNDIHSVIFEVLKNPIIKDGKIDGKSVEKKIKNQIYKQINEIKNKKEESKIIKNF |
| | | RKKTESDLDLKKMIDDLIKEIKITDDKIKKLDENKKEYFDYQKNKTAKKRNYILQNSEKGEIATWLANDIKRFFP |
| | | KEFKEKWKGYHHRELQLSIAYYDTQKQNVKLLLYGLDYRKEIPMLDFSKPNFLDFYEYYLKKRKPQLYNLLSD |
| | | LEKLERGESINKEMLLSKYFKLFRKSNYQNKSLDDKINTALANPIFIERGFMDGNPTVIPNTTIKGNESRFANWFV |
| | | AYKQFDEYQKFYNTEEYFLELKDKTPNEIKKIQSQIYTQKKNDWAIWKMISYIFKDIFNQDLQNVSLSELYQNRE |
| | | QRLENEKKSKEGERKQNFFWNKTVDLQLNNKINIPEVKLKDIGNFRKYEKDERIKVFLSYNDITDWMAYLPND |
| | | WQEKHTIKPINVIDIQIDKYEKIRQHHLLKEVQNLESEIYNKAINKEELLQEDIKGNKNPNFKKYIVNGLLKQIKG |
| | | LNVENFKIPNSDKEFNALSEETLRSYTELEQKVTLLVLIRNKFAHNQLPNKDVYAFTQSIRKRQKNETYAEYYFN |
| | | LFEKIRGEI* |
| 48 | JW13150 | MEENKVRFTNTSNVKRPKSLLKQMGHKSTFLLDDTLIVTSVAKGKNEDQKGKEQAASKSKVAPQSHIELLSTID |
| | | GEVLGGRKELLATTVSRQEVTISGKIYNLNTKTPESTTVTMANPAVLLQKNSSTTQVARKTDYLGIKSALEKEFF |
| | | NDFSNSGFNDNVRVQIAYNILDIRKILATTINNIVSMFYNLDRTTGDIADETKKSTNTDIIGMIKTYLKYDQAKNS |
| | | NDPSIKKTFNKAEELLINTKAYHTYFDRLFTTPTRQAFKAGKLKDTNDKKSNLPCEFSKLSEKDQEEFKNEAITH |
| | | NYDVLRLLGLGRQLVVHEKYKSDEHNKDNSIESLFNIDKIIRNSNDTMDLLKRLDNIYLESAEQIDNSFKKSSAT |
| | | NCLILEELYKRIGKAKTQAELYKDYYRYAILKEDQCLGISFNRIKEAVLEKLKEEQRYKNFEYRNDNKRFYTLCN |
| | | FVLWHYMVDLRDRNETRAGHQQTDRNEIEELKSKLRACCDNNGDGGENQKYAIYKEFVNFHWTDLRTSINTL |
| | | YDLCVKYKYTAKNYRIDSKIQIDNQLSSSANNVKTFVKYIYFLSEFLDGKEVNVFFNELVEKFSNIAEIVTTVNDN |
| | | INNSSKKSPNISFLPQYSLFQEAGTVADQLRNARNIKHATLRARINDKVADKDSKMSPSKQTISDALYMLIDEND |
| | | TIENYKQLIWDEKESGTWVKKATGNNKVRNFIINNIIMSKWFMYISKYSDPRNCSKIMHNKEAVVFAMSSIPDA |
| | | QIEKYYKRVTAKSVQYGNKTAEEMRSIVIDALMNFSLKPVLTGVANNDYSNENRERDIGIIQLYLTVAYIVTKSL |
| | | VNVNKRFLLAFSCLERDVPLILNGKSFKDANILVLSEKFIAEDQEIEQKYKLAKKNRITPNMSKEDVKNVFKELN |
| | | AEYKSKHYAESLTRPRDPDSKKDKSCAYLVNNLNEAKKIENVLMDFKNKVDHLNVVKSAPEYMSNIKNIDSFY |
| | | GIFCFALQNILADKMIKWSVNEKNSKEDVEIINSYGQELKKKLDSRHTFDRDAMWIINMPFAYNFPRYKNLSSEY |
| | | LFYDKEYEKTKK |
| 49 | JW13153 | MKIPQIIENNKHLFGAYSTMALSNIRNILDHIATLADIENDFYSDSDSYWYHPCIKIIDPRNNCTDAAKADFVIEKI |
| | | KSHFPFVPIVAEAQRQSDILRAKKQLDIAVRNRDYQKQEELKHRQKSLLSVTNADIYRVLNNMLWVLANYRNQ |
| | | TVHYLISDIKFEDGSDFLNYNEQPLSRMLNNYFTIALRDTANKYSYSPEALSFIQSSRYKTENRRKILDTDFFLSIQ |
| | | HNNSDTNPKNLHLSGVGVALLICLFLEKKYVNVFLQKLPIYGPYKKQSMEANIIRQSFSIHTVKLPKERIVSEKSD |
| | | FTIALDMLNELKRCPKQLFSTLSYADQNAFRIVSSDMSDVLQVRHTDRFAQLSLEYIDRRELFSDIRFHLNMGKL |
| | | RYLKTADKHCIDGVSRVRVLEGKINAFGRIHEFEARRKEQGFVEWHEQAARLIKTNKNIEIRDFEHVKRDDATP |
| | | DSYPYIIDTYTHYLLENNKIEMRFGDYLPKLVKVDDQKWTVYNEMPTCCMSALELPAMMFHMMLCGSEATEH |
| | | LIKAEVEKYKKLFGAMANGTLSKENIGNFEIAMEDLPKKVIDCVNRKKSGKSFVKQIKKEIAEMLADTNLRIVRL |
| | | KSDKRSVASTQNKMGKRGFRSIQPGKLADWLAADIVKHQPSLFSGDDYGTDRITGMNYRVMQSTIATFNAATP |
| | | EHSLDELKRVFSAAQLIQCQEREHPFLQKALNRNPQNTIDFYEFYLQAKRAYYQSLRQSIENGEDVKLPYLNPDR |
| | | NKWVRRGASFYSTMGDIYLEDMPIELPRQMFDKEIKKALAQLPSMKGVDMKQSNVTFLIAEYLKRELKDDFQP |
| | | FYQWNRNYRFTDMMICEENCDTKALASKFIPLELREEIWEKRGELKDAYKRWAFGRLNKNPDIKRLSPAEKDEL |
| | | LEKRIAKCRNEYQKSEKIIRRYKVQDVLMFMMVKSMFAQGVFTAESKEFALSTITPDAERGILSEVVPIDFKFSID |
| | | GKTYTIHSNGMKIKNYGDFYKLINDKRMKSLLNIVTHSTIEKDLLEKEFSTYDDKRPEAVEIIFEFEKAAYEKHPE |
| | | LKELLTPERKFDFRALLEELQAKSDLSQIDARYLSQIRNAFNHNAYPRNLKITSNIPEIAQEMVNIFRITDPYKKGKK |
| 50 | JW13154 | MESLIQQEENKARNLIDDPQYFGGYLNMARHNIFSINNHLASYFGTSGLSNEEQIPDSFLLSADKRRNQETKELIK |
| | | ENLLFERTLRFMPIFRIFDTERLPKEVRLNTENMEKDFDEMRKCLKQVFSELNIFRNDYTHYFSTNTETTRKLQVT |
| | | PELEEFLSRSFKLAIAFTKQRMRDVLKEEDYSLVEKKVMVLPEERVITTEGIVFLACMFLEREYAFQFIGKVVGL |
| | | KGTHRNEFIATREVLMAYCVKLPHDKFISEDSKQALILDIANELNKCPLTLYDVITEDGRKQFRPELTDDAKKSVI |
| | | ENCINEDLEVDYDEYIQILTKKVRYKNRFPYFAFQYIEETKLLDNFRFSIDLGQFVLAEYEKRMAGEPTSRIVVEN |
| | | VKAFKYLKEVTDEDVVLGLMKSNPPSNRFLQFSPHYNSDNNKIGISSKPQTSVVKSKGKIDSKIEYKIKQPLPRAF |
| | | VSIHELPKIILLDYLSKGSVVKIINSFIRTNKSIILDVDKIKEIKEKLPNNEVWFPFRRMTDSKKHSAYSEKQKAEIL |
| | | RRKKLLNEILSSYSLNIKQIPSRIIDYWLNIIDVRKERSFSDRIKLMKRDCADRYKAVKRNEKDKTVAIPKIGEMAT |
| | | FLAKDIVAMIVDEDKKSKITSFYYDKMQECLALYANIEKKNLFIHLVTNELKLNEKGGHPFLKRINLNSITRTKEL |
| | | YEIYLSEKAYKLNSKENDESWMSMTFYHLEWNEKAKKKMTKVVYPVNDEQIPYTIKQWNKPQQPLFDRFTNE |
| | | QGKSSDWVRLKPLDLPTNLFDEEICVQLRSRLQEAKIPFDNISNYSELLKLWWKSRDDSTQPFYLLERQYNIYDE |
| | | SVRFTLNSKNKFKDYYQAALKKVFNQKKAEREAKRRFNKRLPDIQFKDVERVFKHAIAETEKQIRIIQEEDRIML |
| | | LMLEKLMDDQQLKLGKAETLLSSTVPVKQKIGDKTNSSRVIVAQRKQKHYTVLRKYQYDRRLPELFKYTTEKE |
| | | ELKLEWLEDELKAYNKGKLKVFDLVFSLEKRIIEVAKQDIIALLDKSGSNDSKFNVDHKPYIKWLENMELINSKE |
| | | AGFMKKIRNSFSHNQFPECQTVELMISLKSDIPIATQIVNEYERLILRISSQIEKMK |
| 51 | JW13155 | MEKELIVNENRERTLKDDPQYFGGYLNMARLNIFNISNHIAKRFGFTILPNEERISSSFLCNKALKNADWNHIHSR |
| | | TKRFLPIIKVFDAESLPKTEYDFLMWEGKNFALMTDTLKSVFSEIQEFRNDYSHFYSTEKGTIRKTKISPQLASFLE |
| | | VNFKRAIEYSKIRLKDVLREEDFNLVERLKVCNNGSEITTEGLVFLICMFLEREHAFQFIGKVKGLKGTQYPSFIA |
| | | TRETLMSFCVKLPHDKFVSEDPKQSLILDIVNELNRCPKTLYEIISEEDRKQFRPELDIKSVDNLLKNSGKEELLDT |
| | | MEFEEYMESLTKRVRHSNRFPYFALRFIEEMKLLNNMQLHIHLGKFELQKYDKQLNNEPFERAIIEDAKAFGYL |
| | | KDFNDENDIKGEIVSGKDSEGFAQFSPSYFLKYNKIGIRYKRDIPHLIVDKNNSKGAYNLKQPLAKAFLSAYELPK |
| | | IILMEYLQKGRAGELIDDFIQLNDNKIMTWDFIENIKSQLPDWKTFNKKSFGLKDKKGYQTEELKELNTRKNQLN |
| | | KLLAPEGLNHNRIPERITDYWLNIGDVKKKRSFSDHIKLMKREGMERLKQLEKFKKEGKGKIPKVGEMATFLAS |
| | | DIVNMVINEERKNKITSFYYDKMQQCLALYADSEKKALFIQIIKELKLNEEGGHPFLKKIDLQKISKTSQLYELYL |
| | | TEKVNKPIREEVFKYDRKKGYKVTKIILRDKSWMGEMFYTTEKSEKTGKDITIVRMPENKTEIPFTIRRWEEKQK |
| | | TDLKVWFHNVTKGKDKTKDGPKAISLPTDIFDDEICTLIKIQLDKINVKYKENLKYNELLKLWWWKSREDDVQ |
| | | NFYHSKRLYKVYDEEINFTPDTKSTFVEYYEKALNSAFEKLSKARKKERKTHRALPDINKKEVEKVFKRAIGETE |
| | | KDIRILQEEDRISILMLEMLMDNATLKLKNISYLLNDTTRIQQSITAHLSFDENGESIKEGTKPTITKTIIADRKQKN |
| | | YTVLRKFIFDRRMPELFEYYASNEVALDWVTDELRAYNTAKQYVFDNVFNLEQKLIEKDETGIKAMYTNKEGT |
| | | PITGNIQYKPYVRWLENKGLINKNQKRFLTMTRNCFAHNQFPQKKTVLRIVPNLTDNNIALQIADAYKNITDEIL |
| | | TKL |
| 52 | JW13156 | MDAEGKNERTLQDDPQYFGGYLNMARLNIFNISNHVADKLSIALLKNEEDINNSFLCNSNQKLNWSKAYAMTM |
| | | RFMPLLKVFDTERLPEHRTSQKDKEKGKEFGIMCDSLRIVFRELNQFRNDYSHYTSTEDNFTRKIEISPELAEFLT |
| | | CNFKRAIEYTKQRFADTYQNEDFILAERMQMVKSNIITTEGIVFLTSLFLEREHAFLFIGKVKGLKGTQYKQFKAT |
| | | REVFMSYCVNLPQDKLISDDYTQSLTMDIINELTKCPETLYNVLDESARKQFIPQLGEVETDNVRQNSINEAELTD |
| | | ENDYAQYMEDITKRVRHSNRFPYFALRFIDELDLLGKFKFQLDLGKLKLNTYPKPYMGEDVDRAITENVSAFGK |
| | | LSDHQVKEEVQAKVVKDYSSVQFDQFAPHYNMECNKIGISRKSETAIVIKPSETGVKSAYKLKQPIPEAFLSIKEL |
| | | SKIVLLEYLSPGESQRFITDFICTNSDKLMNLDFIKEVKGKLPVFDKPFYKKVTIKRKSYTKHELTDLEARKNLLD |
| | | QVLVTYGLNTKQIPTRITEYWLNIRDVRNQYIISERIKSMRKDCTTRLKSLKKLDETGKGKVPKIGEMASFLARDI |
| | | VSLVIDPVKKKKITSFYYDKLQASLALFADPDKKKEFMHLVKDELNLLSVGGHPFLINIDFTTIHYTRDLYKKYL |
| | | EEKGCKITNDRKDISWIFNTFYKKEPGKNSSLPVTKVKLPLDKNGNPDSKRLPHSLYSLGNRKTDNSIEEIEKWLS |
| | | NVKHGKMKTDCTKPVDLPTNLFDSRLIELLQKETGDTSLAPKLNGLFVTWWKKRGDSTQSFYNDKRNYVIYDQ |
| | | EVCFLPNTKKLYQDYYQSALDRAFRLKREERRQERLLNIRLPDIQLKDMKKIFNITLSETEKEIRILQEEDRLLLLI |
| | | LEKLMEKEIAGTLNLKNVNDLLNEQVDICQQVKTYLSFKENGELASKDERMQITKNIISYGSRKNYGLLRRYVH |
| | | DREMPELFEYYPTDDIPFEAIKQELEAYNKAKQIVFDKVFELERALTERFKDEVMAHFVNRDGGSRLKGNIQHSP |
| | | YLNLLESKGIISKDAHRFLKAVRNAFSHNQYPHKKTMEIFVKEWNTSNFANQIVDIYKQKIDEVIDNIKK |
| 53 | JW13157 | MEEANRYIYGAYFNMARDNFLNTIKLLADKMKLGATSGFGKDGNEVNDINELFGDKNTYANIENVVEFYFPWI |
| | | KALEGRFSLDKGDRNLNDMKMFYKSVLTAFFTAVDSLRNKYTHYSHKDLNIREIKIECTLGGKDYCIGLLNALD |
| | | CIYDSAVNLLKLRFMADEDEVAHLRRCKAVNKKVVVRTEKDGFYYRLSDNGEVTEKGVIFIASMFLNRKYGFL |
| | | FLKQLEGFKRSDEKRYRLTLEAFLAFSNIKPVDRLKSDKLDRASLGLDMLNELTKIPKELSETLSVDCLYKYLAS |
| | | DGEDDLRSRIRYQDRFVPLALEFISQSDEFKDFRFYTYVGNYVYKGYIKRLIDGTDKERYLSDRLCGFYKSVNDA |
| | | SSDAIAQKYGVEIKDSNEPDYMLPDSFRPHVLRATPHFVINNNNIGIKICGNDCLPVVNGKGVESPEPDYWLSIYE |
| | | LPAMLFYAYLREKNGKLLKDYKSIRELIEDVEKKADEKNDRDKGALMARHIDKEIIWTQTKLDEVKRLEEKKV |
| | | AAYGKKGRVVLKSGRMADLLAHDMVRLQPATKGSDKITGANFQALQVSLAYFKRDILADVFSRAMLTTGNHR |
| | | HPFLYRIDVSHCSSLRDFYVAYLGERRKYFEDVAKKITKNKLNTPCHILRRLQREGSGEEAGKDVKPKFLPRGIF |
| | | TGSIKSCLEKSALNINIRNARNDVKPAINAAYLIFMYYKEIEKGEFQGFYGEKRRYDILEEGKPLDLDERKKALAS |
| | | IKPAKIDVSEANMPMSKEEHLMRKRYHAVCNNESAIRMYQVQDILLLLMAKDIFKKALSEVVMSKKIGLENLN |
| | | GIFDAPVNFVKNFDNIKLTATGIKIKDYGKVCRLGTDFKFNSLIKAFHKVYSKSVEMDYSDYLKEEEEFEKYRLN |
| | | MVKLCREVERGITEDLHLSLDGKSHLSFNDDVIKSYNDKYNVFNGDDLTFFINARNMFMHGDYKYECVKYVVS |
| | | EHFKGSLNDVSFAKETYGHFCNLLESMRKKTGLRIDI |
| 54 | JW13158 | MTETKSKREDIAKPPAAKSRSKAAGLKSTFAVNGSVLLTSFGRGNDAVPEKLITEKAVSELNTVKPRFSVEKPAT |
| | | SYSSSFGIKSHISATADNPLAGRAPVGEDAIRAKEVLEQRVFGKTFPDDNIHIQLIYNILDIRKILSTYANNVVFTIN |
| | | SMRRLDEYDREQDYLGYLYTGNSYERLLDIADKYAVDGEDWRNTAAGISNDFEKKQFQTINGFWDLLDMIEPY |
| | | ICYFSEAFFCETTVKNPDSGRIVPCLEQRSDGDIYNILRILSIVRQTCMHDNASMRTVMFTLGQNSVRDRKNGFDE |
| | | LAELLDYLYDEKIDIVNRDFLRNQKNNIELLSRIYGSSADSPERDRLVQNFYDFRVLSQDKNLGFSIKKLREKLLD |
| | | SPALSVVRSKKYDTMRSKIYSLIDFMIYRKFSENHVAVDDFVEELRSLLTEDEKESAYSRWAETLINDGFAQEILV |
| | | KLLPQTDPAVIGKIKGKKLLNDSIAGIKLKKDASFFTKIINVLCMFQDGKEINELVSSLVNKFANIQSFVDVMRSQ |
| | | GIDCGFTADYAMFAESGRISRELHILKGIARMQHSIAGLGDVKIYSSDDKFHGVSRRVYTDAAYILGFGERSEDN |
| | | DGYVDDYVSSKLLGGADKNLRNFITNNVIKNRRFLYTVRYMNPKRAKKLVQNDALVVLALSGIPETQIDRYYK |
| | | SCIEKRSFNPDLNEKIAALSEMITTLKIDDFEDVKQNPEKNANYEAKKNQRISKERYKACIGLYLTVLYLICKNLV |
| | | KINARYSIAIGCLERDTQLHGVDFKGAAYMTRDVFIAKGWINPKKPTVKSIKEQYAFLTPYIFTTYRNMIAHLAA |
| | | VTNAYKYIPQMDRFKSWFHLYHTVIQHSLIQQYEYDRDYGRKGAPVVSERVLQLLEQCREHSNYSRDLLHILNL |
| | | PFGYNLPRYLNLSSEKYFDANAI |
| 55 | JW13159 | MNIPTIIEQKKQFFGTYSVMALLNVQTVLDHIQKLADIEDIPCYDENGKEKDKRENLWEHSVMLYINYKNNSIQK |
| | | APEKTALIIDKLMAYFPFLKIMAENQRTHKNKKYQQNRLEVNSDDVFDVLNCLFRVVKKYRDTTTHYMLHDEC |
| | | WDDNSKFLRCSEQILATMLNKYYDVALRNMKERYGYTTEELAFIQNHRYKIEWEPDSRKRPQSNTRFFFSLVDN |
| | | NGDANPDTLHLSGVGVAVLICLLLDKQYINLFAQQLPAIQKFEPQSAARKMLVRSMGIHSIVLPKDRIHSQKDN |
| | | MSIAMDMINEMKRCPKELFDTLSPSDQSRFRVTSSDHNEVLFLRHNDRFAQLALQYIDYCKWFNGIRFHVNMG |
| | | KLRYLFNAEKNCIDGINRVRVIEHALNGFGRIDEMEDLRKSEVGTFANTGVAIRDFENVKRDDADPNNYPYIVD |
| | | TYTHYILENNKIEMLLTDTNSLPTITEKGGKWYVGKKAPTCRMSIFELPAMMFHAILLGNQATEKRIKTVCANYS |
| | | RLFEALKQGAVNKDNIASFGIAEEDIPQKVLDIVNGCAQGKDVNIFIKKNIDEMLHDTERRLERLREDREAVNAN |
| | | DNRMGKRGFRQIQRGKLASFLAEDIVKLQPTLCNGTDKLTGLNYRVLQASLAVYDSGGMNEARQQFKALFVK |
| | | AHLLGTDPHTCHPFLHKVFARSIPDNTIDFYERYLAERESYLSTIQKKVAMGKAVNVPFINRAQSKWSAPTQEAL |
| | | GNAYTDDMAIELPRQMFDDEIKAHLKTLPEMADIDFDNANITFLIGEYQKRVLHDNVQHFYSWQRNYRYIDML |
| | | KCETDRKNCLCSTYTSVEEREALWGRRKECIEKYRQWFTRKTSNDRGRSLISAVDIEEILDKRLSNARNEYQKCE |
| | | KTIRRFKVQDTLLFILAKKALTNFADYNGERFCLNDITPEGDKGILSQLMPMIFRFEKKGKVYTIKSESMKPKNY |
| | | GDFFVIANDNRICNLLDLIEDNIVSKEDIDKELQKYDQCRPEMAKLVLDLEKWTYSKSPGLMYKEKVQFKDVLD |
| | | ELCKHTNLTERQKFVLGKVRNAFEHNDYPEKGILEITTLPQIAARMKDLFDEYAEVE |
| 56 | JW13160 | MKEKIKNKSSIIRIIMSNYDDKGLKEFKVLYNKQGGVDTFTCKTDIVDGTIIFLEIEKHLRDFGDDFSWDISSDGKS |
| | | VEITKLINGKETRKYKVSIKNSSTKDKKNLVELEVEDLKESAIDRRRTKSSTKRVLLSKDVMERYAEIAFSKKER |
| | | WEEIDSQKIYKVKRFLDYRSNMLIYFQFINDFLTKGIPDELDKNGEIKQLELWKLIDDDETISDKNLNQVSKNLYT |
| | | YISQEIKDSQTRAENNREKNKEKEHFKEFYAFNDISEESIREDVKKFIYLYANLRHNLMHYNYSFFENLFEGKDL |
| | | VIEKTKSLLSSTLDLNIFKELSNIVELREENKTNYLDDETTIRVLGKEKKAKTLHKIYSILCSRKNGFNKFINSFFST |
| | | DGIEEEFLKSEIKKDFLERLNWVEKSLIEKINNPPSDTKLKYKNDKTIENMTKEKEEKLELISLLNPQVSDYKTENF |
| | | TPYYWDIHQSPSYKKLYNDRKVLVSELSKLIAIGINSDTKKRITDLNAELLKIKIKMEKITKLNSKIRLQYKLQMA |
| | | FGFIYANYSKVYKEKRVLNINGFVQNFDPTKLNKEKELESRLIYLKAPYNIFEDNKSLDFNMKIVENIPVSEKSIFR |
| | | IKPENNLSKFYILSYLLLPVELRGDFLGYVKHHYYGIKNVDFEEIPDIKEDKPNENSDSFFHNLRLFEKNSKKFELI |
| | | KYRLVEFGNLKDHLPRIYEKFGIKPDVLEYIENSGNKDSKLFDRNILLPIMKYYQHIFKLLNDIEVHALLRFSEKD |
| | | SISLDESIKECSKGKFLNFGKLLFLSRYGLEAKKDNKFKDIFNRENGLSITKDDAKTERKKYFEIFETRNKIAHLNY |
| | | KQLFHDLLFDSNININKELEGIIQETKTIGLNAQTLGYNFLNDFYMRKEMFISNQKKSSMTLINNPLSKDKDTKEI |
| | | GLLKLYGLSKSQPKDLILAKYKELMNLIEKTEDSILKKKDFLPVKEVSITVKKSTPNKKGIMVELPEILQIKDLNE |
| | | MDLLAYASNIRGKLHKDSSDLFGIYKKLTIKELKKKLINLFIKGEKRYLNLELVNKTGYMAIYESTGLYPKSYEIL |
| | | NHEISFSEISMKNWYEHDFKPIFQIDGSLPNNTDYKNGVFIYTSPYEFRDKELMKKQRTVHKRDIEKTFYNENDM |
| | | DYTGIYNQKIKALY |
| 57 | JW13161 | MFNDSQGNQIEQNDKSFLEIFLNQARLNAHITLCHISDLLGENTVDEDSLAIMPVLRFLESDKDAVKSERTFELVE |
| | | KHFPMLKVIYGSGPKKEEVTFLGRTKKYKEILGCFLKAVNGKRNEYCHAYSKSSGDYDIKTLTRHLENCFDASV |
| | | RKIKEIRSLEEEEVFHLRRKTSEGKGKEKRVVDNPNFHYHFKNEEGQLSEKGLAFLVAMFLEKKDAYLFLKRQH |
| | | GFHRGESPGEKATLESFCVFRIRLPKPVMTSDVDKNGLALDMLNDLKKCPKELFELLAEEKQQEFRVTDSEDGD |
| | | EDGNEILMRRYSDRFPYFALRYCDENEVFKNIRFHIDLGRYYFKFYEKDTIDGNKYQRALDKRLKTFGRIKDVK |
| | | NKVRQEWGDIIKAPDEISDEQNEPYKTNSTPHYNLVDNQIGFTISGDCKLPDVKQPEGKILLQKPDAWLSIYELPG |
| | | MLFHGLGYGFKKTESLIEQYIIRQRKICEEIFRTGTIPANAGEFLPNAIKEIGTGNETSNEYAKNKLDRKLSDTRQRI |
| | | RAIKATKNRIADKSNKPGKRKFFDIRAGKLADFLARDIMALQEFDPAKEGKDKLTSINFQVLQATLAFYGAKKN |
| | | TLAGMFKRIGLLEGDNPHPFMKEIEPGKHNSIVGFYEAYLDRKEAYLEECRKGENLDNYQFLRPSRQRYAKGKR |
| | | DLKTITRQLLDNPVNIPNGFFREEIREFVCEQDAGLKSRKMNTAYMVGANFEKTYGGQQPFQYYQRNYPVVLK |
| | | AQEYCKKRENRGIAEVLRSIAGEMSYREMEAFIKKEIPDNGRFEPENLKRNLLNGCKDFKKNERLLRRYKVQDM |
| | | VAFAMVEKTLKEQLSFDGNVVKLEAITPTEESLFKKPILCSTDIAITFNTKPTHYDNGYVGFIQEKYAGHYASEG |
| | | NKIILKYRIISENTKLKDIGKYRRYLYDRRLPGLLIWKYAPNAQSDIEIKYSEIEEEIKAYEQYRLRIAEQLYVLETK |
| | | VIDCYICKDEPGEDYISFNGIIDTIKAEQAGSEEKCDTLLSIRNAVYHNQFPAFMDAIEKTEGDNIAGKMLSITEDY |
| | | VKCTVEQMNEGDKEFVNV |
| 58 | JW13162 | MNSVELKKEEAAFYFNQAELNLKAIEDDIFDKGRRRTLLDNPRILAEVENFIFNFKDVTKNAKGEIDCLISKLREL |
| | | RNFYSHYVHNDNVKVLSKGEKPILEKDYQFAIERTASEDVKLEIVDKRDKLTDAGVLFLLCMFLKKSQANKLIS |
| | | GISGFKRNDPTGQPRRNLFTYFSVREGYKVVPDMQKHYLLFTLVNHLSNQDDYVENVQQPYDISEGLFFHRIAS |
| | | TFLNISGILRNMKFYSYQSSRLKEQRGETKSDKGYFEWIEPFQGNSYFSVDGQKGVIGEDELKELCYVLLVGKQD |
| | | VNKVEGRITQFLKKFKNADSVEKVEDDEMLDRENFPASYFAKTRVGSIKGKILNRLKKAIESKKITGVDVKAYN |
| | | KMKEVMAFINNSLPVDEKLKPKDYKRYLGMVRFWGREKINIEREFRSKGWSKYFTSGFWMAKNLEEAYKLAR |
| | | QKNAELFNKLKTAVEKMNEQEFEKYQQINDAKDLASLKRLAQDFGMKWEEKDWQEYSGQIKKRITDRQKLTI |
| | | MKQRVTAGLKKKHGIENLNLRITIDSNKSRRVVLNRIAIPRGFIKKHILGWQGSEKVSKKIREAKCKILLSGKYEE |
| | | LSRQFFKAKDYDKMTQINSLYEKNKLIALMAVYLMEQLNIQLKEYTELGTLKKTTVDFKISNKVTEKIPFSQYPS |
| | | LVYAMSREYADNVHDYKFSEKDKPFLGKIDAIEKERMEFIKQVLEFEKYLFDNSIIDRKKFADTATHISFKEIVNE |
| | | LVNKGRDGNELTKLKDARDTALHGGILTGTSFEETKSLINEMKK |
| 59 | JW13163 | MCNEIQTNQTGQKDNSLFGIYLNQARLNAYIALCYISELLGEKTVDEDSLSEMPVLRFLDSDKDIVKSKRTFELLE |
| | | KRFPMLKVIYDGEPKKEQDDKFLERTKKYKEILTCLIKALNDKRNEFCHANTKGGGGEYDIKQLIRYLNNCFDA |
| | | SVRRVKDVRGLEEEDVFHLRRKTSQGKGREKRVIDNPNFYYHFQDKEGKISEKGLAFLASVFLEKKDAHELLKK |
| | | QRGFKKDDTPGYKATLESFYCFRIKLPKPVMKSDEDKNGLALDMLNELKKCPKEIFDLLPKEQQEEFRVIDTSDD |
| | | NEDDNEILMRRYSDRFPYLALRYCDENELFENLRFQIDLGRYYFKFYEKQTIDGNTQQRSLDKKLKTFGRIKEVK |
| | | DKVQQQWQDVIKSPDEIEDEQKEPYKANTTPHYNLVDNQIGFVMSRDCNLPDLNQPDGKLKLQKPDAWLSIYE |
| | | LPGMIFHGLTSDFKQTEILINKYIGRQRSICKKIFGTGSIPQDAGEYLPEALKDIEENDTKRTSYAKKKLCRILEDTE |
| | | QRIKAIKKTEQRLVDKSNKPGKKQFFDIRAGKLADFLARDIMILQSFDPAKDGKDKLTSINYQVLQATLAYYGA |
| | | KKDSIADMFKTIGLLDGDNPHPFLKEINPSKYNSIVEFYKAYLNRKKGYLEKCEKEGKFDEQFLRPSRQRYAKGK |
| | | RDLKTIAKQLLDNPVNIPKGFFQKQIKEFVCVREPSLEELQMNTAYMIQAYFEKEYGTQQPFCSYQKTYPVVSKS |
| | | TEYCKKAKNKEIKEVLRKITAEMSYRELRKFIDSKIPDGRYEPENLKKNLLDGCRDFKNNERLLRRFKVQDMVM |
| | | FMMVEKTLKDQLAFEGNVIKLKDITPVEDSPFNKPVFCSSDVSASFNTNKKYESGYVDFIKKNYKGLYISQGGRII |
| | | LKYRVTSESTKLKDIGKYRRYLYDRRLPGLLIWKYPPNIEGGIEIKYADIEEEIKAYEKYRKQIVQQIYMLEKKAV |
| | | DHFKLEIEPEENHIPFNTVTDTIKFRLAGSEEKCDTLLNIRNSINHNQFPVFDEKIENAQGQSISERMFSITENYVKY |
| | | ITEHITESDKDFAYV |
| 60 | JW13164 | MLCPRAIFSTLFNFVHMEAKHTIQYFDFTNIKHKHFFAGLLNTAQHNFDLSLRELAKRIHNKDTTKGLITIAFNNS |
| | | VSESDFKARTNYLSESLAFIKLMNYENRAEFRDTLLVLYNTIDGLRNYYTHYKRDKITIDESVYKLLDYLLLTSA |
| | | KEVKINRAKSEEYKKYLSIKYQDEFEEIIDESNKKIEEDNALLKKGERKTGLIKPQDEVNHVLNKVFRSFLYKND |
| | | KGEDELRDNASSKNKEDTDLSTYGFVQLLALFLNKKQTESLLSYTKYLKDTRKLKFVTSRWTLTFLCYKDIKRL |
| | | FKSDYSNDSLLLQMISELTKCPNEIYRQLTPDKKQEFIEDINEYYKDTISFEGTNEQALVSHEVIQKRYANRFSYFT |
| | | IRFLDEIIDFPTLKFHVNLGKFNHDTTKKKFSNAIETERSILEKITVFTKLSTATNNKKDYFSKPENKELENDWLEF |
| | | PMPSYQFNKNNIGIWLSIDKKSGESDAPEERENSKLSKYKIAEKLLLKNTIRKPIAFLSFNELPALLYSLLIEKKTPI |
| | | EIEKIIQSKIIEQRKLISSFDKTKIISNKRLPKKLIRASHLDSTTDVKKLEKDIKTEISKDPIGDIRKHYKKEIKNVNEF |
| | | TNSEKGKVTTWLADDIKRFTSKETRENWKGYQYAEFQALLSFYDINKDKPKSFLEKDLNYDYKKDNSFNGLNF |
| | | NLKTLFDFYNSYLKNRREYLNNLLKEIESSKDEIHEKVFIGFTKRLYEIKPIDIQKNVFLKKIPLNLPRGIFDDKPTS |
| | | YDKGGKDNTEIASWFTLSSKAENAQLYYCFPKVYSYPTTKLKWDNRKRRKIQKSSIATQLISPKERLKQQYLKD |
| | | LPKTVQVEIYKNEKSIRKIMREDFFILEMVKHLLKKSSIKGLDKLQLKDVFLTKEEKNRRIVESLKQSQRVKGDK |
| | | MENVVNDSYILSQQVAISILNDKIIDTVQIKTIGKLRRLEEDKRVRQLIEYFPDKPSWTVLEIQSEIDDYDRVRKFE |
| | | FFSSVHVLEKLIYKDAKKNNAKEGLLQNNNHNFRKYLSYYYLNEDRDAFNSLPNFDTITIDNPSIKSEWYRLYLL |
| | | VKIRNKFSHNQLLSKVDFDSLKEIISMNSGEKIAAFLNRAFDKLIIVK |
| 61 | JW13165 | MNNNATIQKQSVIYAFDKSEDKHFFAGLLNMAELNLVIALQETLIRTIRNTKTSNNAKVLIQQLFTEDIMQSDWN |
| | | YRVEVLSEFLPVTKALQPQADKATFIKTLTLFAETLNTLRNFYTHHYHPPVEIDSRLFEILDAVLLHSAVYVKKQ |
| | | RLKTEDGKTMFPKQYEDDLRTKLAIHNEGVKQKRISEREKPENKKIPKNKFNEIFNKKNKTYSEADFVNTYLNG |
| | | VFHHLLYKDRKKEGLDQLKKDAASKKKDENYFSKNGFVLFLSFFLDKKNLEDLFSHTEHFRGTHELRFMVTRW |
| | | VFSLHAFRDVRRVLRSDYSNDALLLQMIGELNKCPKELFNILSTEHQLEFFEDLNEYYSNNEGGDESQPDSLVTH |
| | | TVWRKRYDDKFSYFALRFLDEFAGFTNLKFQVVVGNYVHDSRTKELAGINKVTYRTIKEKIKVFGKLSEIDRLK |
| | | KEYFLKKNQEQQVSDPTTETTELSEGWEEYPVAHYKLDNNNIPIYLSIPGFQKDSTPKEYRTKRLNKKSILEQLTT |
| | | TGFIESEPIAFLSVNELPALLYQLLFNNKSAAQIETMLIQKITSQVSEIKRFNTESTIDKHKIPKRLIQLASTIATSTSI |
| | | NFVKLLKDINSEIDTCNSRLKETDDNLNKSKYRRFNNKQRGKVATWLADDIKRFAGKDIRSNNWKSHLHGELQ |
| | | ALLAFYTERKADIQLLLEKELGLPLDSKSLLSTSFSENTLEGFYVKYLKTRREILTDFKASVDKTKNEYPNSLDTS |
| | | TIEPLFDIFDKRLYVSSHIEKYKSDLLQKPLNLPRGIFDTATYFPLQKGDKSNFQPWFEVAAKTEHYQEFYNFPRK |
| | | YETIELNPVSGKGLLEQNNNKPVDPDVFKNEKRLREIARQDFYVLEMAKYMIKHMYPAIRTSQNYTLKDVFKTK |
| | | QEKEQIKLRAAQQSQKKAGSGGEHFTDDSHLLLRRFPVTVAIGNKKIVDYVALKDIGKFRRLEKDNRIKLLLSYS |
| | | EQEIWTVKEIEDEITNYEHIRKQSFFKEVHVFEQEVLQKVKLKAGIDTHPEILEQNGYPNFKHYVAYHFFNNDTIT |
| | | FDKFVKVDFQNEKSRKEIVESKNMLLLKAYFLVLIRNKFSHNQLPEKVDFLKMNAYIKFSGEKIGDYLLHFFKES |
| | | IVY |
| 62 | JW13166 | MSAMTKGLRNCKGCVNMKKKMSLREKREAEKQAKKAAYSAASKNTDSKPAEKKAETPKPAEIISDNSRNKTA |
| | | VKAAGLKSTIISGDKLYMTSFGKGNAAVIEQKIDINDYSFSAMKDTPSLEVDKAESKEISFSSHHPFVKNDKLTTY |
| | | NPLYGGKDNPEKPVGRDMLGLKDKLEERYFGCTFNDNLHIQIIYNILDIEKILAVHSANITTALDHMVDEDDEKY |
| | | LNSDYIGYMNTINTYDVFMDPSKNSSLSPKDRKNIDNSRAKFEKLLSTKRLGYFGFDYDANGKDKKKNEEIKKR |
| | | LYHLTAFAGQLRQWSFHSAGNYPRTWLYKLDSLDKEYLDTLDHYFDKRFNDINDDFVTKNATNLYILKEVFPE |
| | | ANFKDIADLYYDFIVIKSHKNMGFSIKKLREKMLECDGADRIKEQDMDSVRSKLYKLIDFCIFKYYHEFPELSEK |
| | | NVDILRAAVSDTKKDNLYSDEAARLWSIFKEKFLGFCDKIVVWVTGEHEKDITSVIDKDAYRNRSNVSYFSKLM |
| | | YAMCFFLDGKEINDLLTTLINKFDNIANQIKTAKELGINTAFVKNYDFFNHSEKYVDELNIVKNIARMKKPSSNA |
| | | KKAMYHDALTILGIPEDMDEKALDEELDLILEKKTDPVTGKPLKGKNPLRNFIANNVIENSRFIYLIKFCNPENVR |
| | | KIVNNTKVTEFVLKRIPDAQIERYYKSCTDSEMNPPTEKKITELAGKLKDMNFGNFRNVRQSAKENMEKERFKA |
| | | VIGLYLTVVYRVVKNLVDVNSRYIMAFHSLERDSQLYNVSVDNDYLALTDTLVKEGDNSRSRYLAGNKRLRDC |
| | | VKQDIDNAKKWFVSDKYNSITKYRNNVAHLTAVRNCAEFIGDITKIDSYFALYHYLIQRQLAKGLDHERSGFDR |
| | | NYPQYAPLFKWHTYVKDVVKALNAPFGYNIPRFKNLSIDALFDRNEIKKNDGEKKSDD |
| 63 | JW13167 | MSNEIGAFREHQFAYAPGNEKQEEATFATYFNLALSNVEGMMFGEVESNPDKIEKSLDTLPPAILRQIASFIWLSK |
| | | EDHPDKAYSTEEVKVIVTDLVRRLCFYRNYFSHCFYLDTQYFYSDELVDTTAIGEKLPYNFHHFITNRLFRYSLPE |
| | | ITLFRWNEGERKYEILRDGLIFFCCLFLKRGQAERFLNELRFFKRTDEEGRIKRTIFTKYCTRESHKHIGIEEQDFLI |
| | | FQDIIGDLNRVPKVCDGVVDLSKENERYIKNRETSNESDENKARYRLLIREKDKFPYYLMRYIVDFGVLPCITFK |
| | | QNDYSTKEGRGQFHYQDAAVAQEERCYNFVVRNGNVYYSYMPQAQNVVRISELQGTISVEELRNMVYASING |
| | | KDVNKSVEQYLYHLHLLYEKILTISGQTIKEGRVDVEDYRPLLDKLLLRPASNGEELRRELRKLLPKRVCDLLSN |
| | | RFDCSEGVSAVEKRLKAILLRHEQLLLSQNPALHIDKIKSVIDYLYLFFSDDEKFRQQPTEKAHRGLKDEEFQMY |
| | | HYLVGDYDSHPLALWKELEASGRLKPEMRKLTSATSLHGLYMLCLKGTVEWCRKQLMSIGKGTAKVEAIADR |
| | | VGLKLYDKLKEYTPEQLEREVKLVVMHGYAAAATPKPKAQAAIPSKLTELRFYSFLGKREMSFAAFIRQDKKA |
| | | QKLWLRNFYTVENIKTLQKRQAAADAACKKLYNLVGEVERVHTNDKVLVLVAQRYRERLLNVGSKCAVTLD |
| | | NPERQQKLADVYEVQNAWLSIRFDDLDFTLTHVNLSNLRKAYNLIPRKHILAFKEYLDNRVKQKLCEECRNVRR |
| | | KEDLCTCCSPRYSNLTSWLKENHSESSIEREAATMMLLDVERKLLSFLLDERRKAIIEYGKFIPFSALVKECRLAD |
| | | AGLCGIRNDVLHDNVISYADAIGKLSAYFPKEASEAVEYIRRTKEVREQRREELMANSSQ |
| 64 | JW13168 | MKVVKPCGNSVVLAGGEIRRTIQPSITSITSVNAKQTHRPAIDFLLNNEKFFLAQWASMLDKIISKPHQANQASPN |
| | | YATYEARENLSKAFYVLWKDKKLLNNFSHKDNQRKSFNQQWGLKVHPYKKPNKPTANNKPEAIKKAGEISKG |
| | | RWYDSLVTKSKPNKNTAKHHKSATIHYKNTAKIIYEHLYVKQRSISKRSAYPQGYIANRANSIEKSVHSFTLKDN |
| | | KLATLCINDQHRINRLTKQSISIAQPSKYRLDGLIKDLKIKTKQYYQNKVSAAELRAKKTKRPVKPPLENQQLPL |
| | | KEAMICLYEHYARIFGTVTKIETIIIKEPELWQYHCLIKSTLKQRYPKQAVLNKIYPVITEDQLHKLAQNIETNKTL |
| | | AMAIRLGKVVHYSQDNLGYEDIEHSDIVNSDYWGSAGQTLIKQKESFAQHWLIALSVANGSLRGLLDTQDNADI |
| | | YLSRGINTALEGIPTDFEARFKLLFGNHHQLYQDDLQRDELLRQLYGTLSQLRHASFHFKSEQSFNQVLLKKVTL |
| | | DTTLDNNTSVSQTLAKNINNYIDEHLAQQQALVKKTLEASFVTKYLNQTQCDQLLSSLQNNQAIATLLPKFNKL |
| | | LHRAATTEQSIIAVANQVELQNNPNQQCAFICLKQLYEQDFWRWLLKQKSSTLNHHIDQAKIRANKQANKLNA |
| | | KNTLEHQKIMARMQQLRGINAQESLLAYFSYLSAQTASFFQIQTNTYQHNAQAASEHSNFIEQLKQDFLIRAFKQ |
| | | YLKAEKFNYLLHLGTPASCVIDIDKITKKTPVNNPLLYLSLHLIPIEFVNQLSLQIKKYTVLTGSEKFGNIHNDINL |
| | | YLTMHNAILDIKWLDNRDELAKFYDNKALFEQVFSQDNKHLIPVKGLREMLRFGNLSELGVIFERSIVEANEINS |
| | | LQDKQKNIAAIQAKKAKAHQKLSQQKDINKQDKADYKSDVDKVSEYNHLKNQVYLHNHKQTHQLIMTISGRL |
| | | VGFSRRYERDIYFVLLALLTLNKVKTDELSQNFLASIRSGQIIKASNQLGEQYANIKSKLNLLFQIEKHREIRNRFA |
| | | HFDDLRKAESLNITQQINEARQLMSYDRKSKNSVVKSILNIVKKDNISIDFTMDNQHNLTLKSIKADSIIHLKDKDI |
| | | SEKPQGKKYKNAVKKLFENTV |
| 65 | JW13169 | MNVIESFLPLNTKEKIDQLMAIIKSEPKAMNQNAWHMIFGNIGKSKMQMYFIEKYPQSLFAAPGNYIPSCNGQGQ |
| | | EEKNPQQPQVQQHERQTDIPVPPTSLKDNRFLYATYIEMAFHNMFLNIKHIYGVVFGRDIMAEAKANYEALNPE |
| | | KKWDEDFANEFLVWKPMFEAFNNGNVEEKQKVGEMLSRHFPLLVPFTDFTNHESNYKNLTIVGILRRLSQVLR |
| | | VLRNLYSHYRIELFENQKKVYLDNEYLIIRCTMNAYMGARRVIKDRFSYDEKDMRCTDQYQFVDERGRRLKEK |
| | | VEIKGFRYKIGEKGKDSKLHFTPFGLVAFISLFLEKKYSKILTDKLRLIPIQDQHIINEMLAVYRIRLNAQKLNISKD |
| | | ADLLALDIINELQRCPKDLFSLLSPSDQKKFRHESEANDEVLMVRHSDRFPFLVMKYIDDCQLFDNIRFQVSLGK |
| | | YFYKFYDKNCIDSETRVRALSKNLNGFGRLSKIEAMREGCWEDSIRQYDDIHKNTVDEKPYVTDHHAKYVING |
| | | NRIAMRIIREEEKAYLPELNAEGVRNLAPTCWLSIYDLSSLAFLLYLTNGDFVEGIIENTVENYHKLFKDIENGTM |
| | | LPVANEEELDSLLCRNYGGIKQKDIPKNMLDYLLRKTSDARKRFVEFSKSIIDRMISQTEYKIEQIKRQEEQCRQN |
| | | KIGKKSYVIIKDGKLASFLANDIMLFQPNDSENSNKLTGLNFRILQSTLATMKECGIDQLKRTLTSAHIIGEANDE |
| | | YCNPIVMKMMRKRVPENTRDFYKSYLKARLEYLNECKRKADYENLSFLHSNRSKWQEHDDEFCRLLAGRYLH |
| | | DENGGTEFEKSINLPSGMFDKYIREKLCEVPALKDIANDETKNVSYLIYAYFKNVCNDDCLFFYEAGRSYRLFKL |
| | | LGMNGSKTAQDIRLMLNRKHKTSLYKEIDKYLISIPLAEREQEKARLMGLLKGMKNSETDFKRFKIQDILLFLIA |
| | | KKLFKDNVQDDVQHTAFESLKLKSLKDTDGLSQKIRISVKIKSKNGYEKEIKKPELKLKNYADFYKLLNDRRLP |
| | | ALLDLVREHSIDYDSLVDEFGGYDKVRPNVMKDVLKYERKYYDNHADSDESLDFGSMLDNSSFNEEEKDLLRK |
| | | IRNSFAHNTYPKYYIVNKAGDPHLPEKAIKCSEKFSSDINNE |
| 66 | JW13170 | MAFDKPRPKRRQARSDFYITDKAIMGGYFNLAQLNFFKTLMEIFTKAGIDVSKIKQDNSPKYLMILIKKLTHDDE |
| | | KIDDKKWADALDLSNECLLKLQQLLYKHFPFLGPVMGGEASYNIYKLKDGHPEVKVANDVMRGVKLEDCLAV |
| | | VRHFALCLNDCRNFYTHENPYNPIEAQKEQYLSQNKVAVWLDKVKDASRRIIKQNNQLTSQDMEFLTGIDRMK |
| | | PQDKVDDFGNIMTDRRGRPIKEYVEYEDYYFRIRGKRYLVDAAGAKLVDQEPRNALSDFGVVFLCTLFLESDQA |
| | | RRMLDELRLFETGPYDGSRDGDEFKNDILREILLFYRTRVPRGKRLDPMDDTTLLAMDMLNELRKCPMPLYDV |
| | | LSREGQGFFEDEVKRPNDLTPEVAKRLRSSDRFPYLALRYIDLNKCFDNIRFQVQLGKFRYKFYDKTTIDGEQVV |
| | | RGLQKEVNAYGRLQDVEHYRQEKYADMLQQTELVETGEEDITIANFIPDTPQSSSYLSDRTASYNIHNNRIGLFW |
| | | NMPGEQEVLAGDEKMYLPDLNVDDNGKADVFLPAPKASLSVRDLPALVFYLYLQNQHPDLTPAEAIIQQKYNA |
| | | LVSFFEDVSTGRLLPVKDIAELEAAIDKYGHLTVHEIPEKLRDYLTGVAGTEDDDDCADRLDCYAMGILEKRYR |
| | | RVAAHIDQLKEARKMVGDKMNRYGKKSYIDVRPRRLAEQLAQSIVDWQPATDNGRHKMTGKNFQRLIAFLAR |
| | | YTDEVPVQEIKDLMTRARLLDGPVAHPFLQQVLDKNPLNIEVLYDLYFKEEKLHLENYLEIETNKQGEEVFRKK |
| | | ASVDLSRIPFLNSGRLRFHKRDSASFQRLAARYMQVDGRQSTILLPDGLFTPHILSVLKSEYRDLQDHLQDQELN |
| | | RNASYLMSVYLECVLHDSAQPFYLSNSNDSPFARRYDLFAILQNKKKGAELLPNPLAPVEINRRLTAKTPDGSAK |
| | | LIERDIKALLDDMARKTEERIHDLQQEYSRKKEKQAQEERVKLERCFMRKIADVKKQAQEERINLQRRLKHKIT |
| | | DVKKNERTIRRYKTQDMAVFLMAKQMLANQLSWQNQEGEVPFKLANVCNEGFLRQTMKVSFPYEVPLKEDK |
| | | TKKVTIDIVQDNMSLKNYGLLYKLYHDERVVTLLQNIVDQQQISFAELTAELSLYDQNRSKAFSNFQQFEKLAFE |
| | | TNKEALTHPEHRGFFLEKVNKKNQVIRYERRNNFDALLDLLDAIEAHQLDPRERQWLTSVRNAFCHNSYYKID |
| | | MQQIEKKLPTIIQQIVEIVQRITDKASHPSNR |
| 67 | JW13171 | MSTSDSFYSFGVDYTKTYDQQPDCRRHVFGAYANLARHNMTLVVNTIMQAIGMPTFNENIISDAFNSTHRKEID |
| | | KLDNIKKVLLQERLYRHFAFLKRMKLEDSKKKTVQLNTLLETLSDFTRMMAYMRNFYTHYNPYNSRDEKEKQ |
| | | GDLNKKMGERLQFLLENSLQMLKDTEKLDHAKNEVLSSLRVPERKTIRPGDTEYSNIHDLYFTKNKRKGIKYDK |
| | | DTKVFTQQVYILNPAYPAKMTDSDGYLSLAGMVHFLCLFLEKKIAFELMDEVGFTQQCHFNGRDAEQQLLYIK |
| | | EVMCMNRVRMAQPRLDSEMSDTALALDMINELRKCPEPLFKVLDKEARNEFKDDATVQWEMEHNVEARPGE |
| | | DEENNNNEDDIEEPDETIREDKAVPRSTFVRWNDRFPQMTLSYIDMQSVLPTIRFQLYLGKYRFAFYEHDKEYSV |
| | | DNAERLRVLQKEMHGFGRPQEVKANLKDKWKDYFEHKTIENGLTMKEPDKAGQAPYVTEQNPQYAIDEKSHS |
| | | IGIRWGEWSSGHGGSHYGDLDKLNMFIPCLPKPKADEDKDKQRNHAEKLLPPKCMLSLYELSGLVFYHYLLKK |
| | | CGKETGQVERHIITYHDNLVRFLTDVKEGTIIPVTDVDDPKGYLEKMLMESYALRLSDIPERIKKYLLNETKSRE |
| | | YRLKESAKKRLEIRLKKVMKDLESHQAKKKRIGTKENKFNRKRSTIKTGKLAKDLIRDIMDWMPRGSVGRMNL |
| | | SGESYMAIQAALTMLGQQFDRGKANVEIYDLVDILVKAKLIMPDSDVEGADFNPSHYHPFMDDVLTEDRCGPE |
| | | TSLEDVYEWYLEEEIAHIKRLISSINKVSTDSLLMKQYNLIPFLHCGRERWNKVDDEAIKKLAEKYLNNPIQLPNS |
| | | LFAKPIFELLKEVAQEKNYDRLSQALEAASQDANNLSKNTAYLIGLYFEMVEGDHSQAFYNSCPADDGTVSPYR |
| | | HVYRVFKKLYGEIIENTNRTTSPAYSKKEISDILAGREVNGKILSDRISRYVQKAVDEFKKQKDDDLKQYRIEIKD |
| | | AAFNENRVKHLRKKAYEIFEEVDVKVDQKREEFERLTDQYRQEVEAKLKKLLKKVQLNERAILRFKTQDILLL |
| | | MMSRDILKMGSDNEFKLENVLSESLLEKRVDFSWKVSVNDQTKDNVTTYKTIEQKNMKMKDYGQFYKFASDH |
| | | QRLESLLSRLSPSVFQRAEIENEFSYYDSNRSEVFRLVYILESFALEMKPGLKDDNNAKEPWFNYIRKGKPSPKRN |
| | | SFIELLEVLIAGADGILDNQEKELLREIRNAFGHNTYDVDFETIFSGPRKSKRKVPEVANGIKDNMEEKTTNVLEK |
| | | TKK |
| 68 | JW13172 | MKQNDREKNSKIKKSAAKAVGVKSLARLSDGSTVVSSFGKGAAAELESLITGGEIRKLSDKAILEITDDTQNKNV |
| | | YNVKSSRIPNLTARTDKLSDKSGMDDLGFKRELELEVFGQSFDDSIHIQIAHAVFDIQKSLAAVIPNVLYTLNNLD |
| | | RSYSTDDTNGKKDIIGNTLNYQHSYDNFDKEKLGEFKEYYNAAKDRFSYFPDILCVLEKVNGKDRYQPKSEEDA |
| | | FNVLSSVNMLRNSLFHFAQKSNDGKARIAVFKNQFDSGFSHITSTVNKIYSAKIAGVNENFLNNEGNNLYIILNAT |
| | | NWDIKKIVPQLYRFSVLKSDKNMGFNMRKLREFAVESKSIDLSRLNDKFLTNNRKKLYKVIDFIIYYHLNKVLK |
| | | DSFADGFVAALRASQSEEEKEKLYAQYSERLFADEGLKSAVKKAVDMMSDTKFSIFKKKAPLDKALIENIKVNS |
| | | DASDFCKLIYVFTRFLDGKEINILLNSLIKKFQDIHSFNTTVKKLSENNLIINADYVDDYSLFEQSGTVARELMLIK |
| | | SISKMDFGLDNINLSFMYDDALRTLGVSDENLPEVKREYFGKTKNLSAYIRNNVLENRRFKYVIKYIHPSDVQKI |
| | | ACNKAIAGFVLNRMPDTQIKRYYDSLINKGATDMQAQAKALLDCITGISFDAIKDDKHLHKSKEKSPQRSADRE |
| | | RKKAMLTLYYTIVYIFVKQMLHINSLYTIGFFYLERDQRFIYSRAKKENKNPSKNSYLNDFRSVTAYFIPSEIMERI |
| | | EKNENKGFLKEFEEAWKTCGETSRLRKEDVLLYARYISPDHALKNYKTILNSYRNKIAHINVIMSAGKYTGSIKR |
| | | MDSYFAVFQHLVQCDILSNPNNANCFKSESLKPLLLDMRFDGTDEKLYSKRLTRALNIPFGYNVPRYKNLTFEKI |
| | | YLKSSINE |
| 69 | JW13173 | MGKKKHDKQEPIANRHILGTYFNMAFENFNRTMYILCEKKLKISTSEYGTPDTEHLIADQPIQLRKALFRYLPFL |
| | | APIMDDWVGYQLRSKKSKGNGGDENITQKQKTAKLDSSIEDIVSQLNIFAQELRYCRNKYTHKNAYTLAWEDE |
| | | EHLQREKQIAKMLEVLMKAERELLKNRKDREKKSSAMELFLKDGDQYYYRTNKGKTVRNKQFYFNPASFELT |
| | | KKGQVDYDTIALTDFGRFYFCSLFLRSRDAERFATEMKIFIESPWPDIKDKDSNPTTYTPSPENKIMREVMQMHRI |
| | | HVPREKRIDAVPSKGTLLMDILEELRRCPKILFDTFCPTTKSSFNHIVIQDDGTKTSTLMVRHQDRFAQLALRYID |
| | | QNGLFPNIRFQLRLGLFRFRFYDKTLIDGTPCIRTVHKELNGYGRLQVVEEKRVTKWGDRFQKVTTKENEGYEIE |
| | | QLQPDTPQTDPYVTDWRSTYNIHTGRIGMSWGEVNVGGKTEAGSALLPKVDRKSNGDDCYYIPDLPTLKSDDG |
| | | KNKDRKVNIPQDAPLCTMSTYDLPALLFYQYLIDSYGRKGADEKKLPTSENIILEKCYALKALFKAAEDNTCTPK |
| | | SLREKERELGLSDNEIPKKLLSYLDGEKHNPQQNRKKHVEHVLNGIINDINGRLESFENKEKRIKAGGRNNRYGN |
| | | PHHADVRHGSLARYLMRSMLRWQSVDVESPHFGKLTSLNARTLMGALAAFGSGDERLPLNEILTAANMIGGNN |
| | | PHPFIEEAINGADNIEKLYVAYLKNEKKHAEKILRNIDEHLQSLPPFLRASDEQNHWGVDLEQQAYINKYAAKLS |
| | | ELPIQLPDGLFTKYIVELLHNATKKYSELKIMDSIVDSDKRTTDKGGHKIGDNPSSSASHIIACYFEKVLGDKSQK |
| | | FYDSQTKDYKRFYENISKLNPRRERNKALIPDYFTAKEIQEKIKEARKSVKGKNDDDATTLRDKLNQVEEKERAI |
| | | RLFRVEDMVLFLSAKQMLMSVVGRSLTEDVNQTNALHESKDNLSQLRIKAKELKLGQFGFDEDFRFLSEGDNE |
| | | EERKEKDQTESLLEYIYPYKIRKEGKLVGTINIKQKGLSLKNYGNIYSILGDDRLKSLMEGLFEIGVSEVTFGDITS |
| | | EFANFDQLRSTILKLLQDNIEEIAFNRNISVLNNPRNRNFYSVKDKDGNQLKIKITDPVTNEIIALSKDAIRNQFPEL |
| | | IKMLEEYEADRVSINELRKAVAHNHYPKDISKLKPTKNKKLQLPNIAHLANENAKKIIDAAQKASAEKEKKSE |
| 70 | JW13174 | MANTQFKLKSVDYSKPYDEQPECKRHVVGAYANLARHNMTLTVNTIMQAIGMEIFDENNIGDAFNSSHRKKID |
| | | ALDNIQKVNLQKRLYRHFPFFKRMKLEDEDKKSVQLTTLLEVMSDFTSCMAIIRNFYTHYHPYNSPDEKKRQLE |
| | | LKKRMGKRLQFLYENTSQMFKTTEALDHESNEVLSALRIPEDYIEEILPGDKEYDNLFNLINDPRTSKFKKQGLK |
| | | LNQQTKVITRKKVRFVRNPDYQAYMMDETNGMSDVATIFFLCLFLDKKVSFDMMDEVGFTKQIKFNGPQADR |
| | | QLLYLKEIMCMNRIRMTKAKLDSEMTDTALALDMLGEVRKCPKALYEVLDKDARNEFKDDATVQWETEHGK |
| | | EAVSTEALASESDEDELTDKNTPRSTFVRWDDRFPQMALRYIDYQGLENDIRFQLNLGKYRFAFYQHDNKQSVD |
| | | NEERLRILQKELHGFGRIQEVEEKKNEKWKELYDEKTVKDGLTQKKTDEAGQAPYITEQYAQYAIDEKSHSIGL |
| | | RWEGWNKKDKSKGHYGDLDKLKMFIPYVPSKPKEEERQTNQAEDLMAPQAMLNLYELPAILFYQYLLDKYKS |
| | | DTSNAENIIKTAYSNLVSFFNDVDQGLLAPAEDADENERISKISSLLEGYHLQMSDIPEKLRNYLCNKGIDYDLK |
| | | MEKSAIGRLEEKKKHVEKALSSYKDKKKIIGSKDNKFDKMRASIKTGQLATWLIRDIMDWVPNKSSARNRLTG |
| | | QNYTALQAAMALFGQQANSNRSYLESCFRNAHLLPLDGKPFNKNTHHPFLEDVLQAMEDETLESFYEKYLEFE |
| | | TKHIAKVIKTLKNGTDFDDYYQVPFLHCDRQRWAGPDKNQAAQYLKRPLQLPNGIFTQPIFDLLWKIDNLELHK |
| | | ALEESQQANGDNPPLTDNVAYLMRLYFEFVEHDHAQPFYYTTTTDGNKSHYLHIYRIFKKLYGQPIPHSNKTTV |
| | | PAYTIDEIRHLRKQAIADIEEYVDNEIEKWRRTKQDRFESKLRKKLKKENDKRYKKHEKQLNINEEIQKAVKKET |
| | | DTMRTDMTSKMKRQLRNVYDNERTIRRFKAQDMMLLIMARNILKAKSNDKDFTDGFCLENVFSDSLLDKPIDF |
| | | EWKVNIKGASKTIKQEGMKMKNYGQFYKFASDHQRLESLLSRLPDSLFLRAEIENELAYYDSNRSKVFRQVYIIE |
| | | SEAYRLKPGLQDDANASKDWFYFTDKKTHKQRPIRNSFIQLLEILAAGEDGILDNDEKVALQKTRNAFGHNTYD |
| | | VDLNVVFKGKEDKKKIPEVANGIKEKIETQTEELKRRSK |
| 71 | JW13175 | MTDNTNKYFKLKEVDHTQTYETQTDCQRHVVGVYANIARHNMTLAVNTVMQSLGEPLFEENSIADAFNDTHR |
| | | KDIRDFENIKKLELQERLYRHFPFLKRMYKDKEVSLKDLMETMSCFTQSMAMVRNTYTHYRPFESNVEEQNDL |
| | | KTKLGQYMEDLFLESRKVFKKEERLDASSNEVLGRVYKSIKNDKGEKYVLDFNYPAYMKQGKEGLSDVGLLY |
| | | FLCLFLDKKAAFDLLNRTGFTQHAKNYFDGNEEQTLLLLEMMCMNRIRMVHSRIDSEMSNEALALDMLNELRK |
| | | CPRPLYEQLGKDDRDSFKDVMSTQWENESPDNEDAPIDAEGKSIPKTTMVRWDDRFATMALSYIDTMQWMDD |
| | | IRFQLKLGKYRFAFYNHDGDHIAGNLLRVLQKEMHGFGRIREVEKEMNEKWGALFEQKYEENGLERKDADQA |
| | | DQAPYITRQRPQYAIDDESHSIGMRWDFTRPKYWDFTKPSYGDLANKKMFIPHLPGNPKPAEEGKHQTNQAERL |
| | | IPPQCTMSLYELPALLFYEYLRRKLRNETMDSAEQIIKRYCNSLKSFFGDVSRGKVFPDDENELAEALNKDYGLR |
| | | LSDIPERLKNVLLGNSFDGNEKLKKIVKTFVEERKNEIKEMKRCLDEGINHKLVKTGQAAQWLARDIMIWVPTQ |
| | | TREKLSGQKYSAIQANLAMVGNWEGAVSYGDLRQLFTAAGIIPESNLKNPNQHHPFLKDVLNGLLNDREHSVK |
| | | SLYQRYLDVESSHISSLELKLARNKNCLDSFPSLHHNRMRWKQQDAAALAQSYLTVKNKAKDSEIILNSEKPIQL |
| | | PKGMFAERILAMMKELAKNNGALNEGLEKIEKQEKGLKGNTAYLIGLYHTFAENDASQPYYNYERVVDEGKL |
| | | AKSERKRMEQTIRRYKTQDILLFYMAREILALPVGNDNRQRFLLKNAMNNDLLSLPIDFSWTVRLKDGSAKTIT |
| | | QKAMKMKDYGNFHKFASDGKRLASLLEQQAETEFARADIEAELARYEQSRVEVFRQVYILESHAVMKLGVAD |
| | | DCDIKAREDLFYDSAKGKRCKLNSFNQLMQALGIGEKDRESLTKIRNAFAHNYYVDLKGIGFWGSVPKIPNVAS |
| | | KTKEWMVRKCNDLYGPRFGG |
| 72 | JW13176 | MAKKKTAKQIREEQKAAKMQKIQTFVKAKEAKKENEKTASAVKLPVKKNRKKSLAKASGSKAVLIVGNDIIMT |
| | | SYGERCLANLEHKITPELNTESLTVNNVLNNVNAKDGKNISFTGRISGLSVSSDNPLHFHQTEERKAPKPGTDLL |
| | | CLKDKLEQWYFDKTFDDNIHIQLIYQIQDIEKILASHVNNIVFALDNILHATESETGDFLGMGYMRATNTFEEYR |
| | | DSAISNVKKSYETFETYIKKKELLYFGEAFYHGNTCRKPEDIYHILAMVSSLRQFCFHSTFDDKSKSIKGSWLYQL |
| | | DEQLSDEFKETLGILWAEATEKLDRDFLKTNTVNLHILCEIFDKEKQEDIINAYYEFLMKKSFKNLGFSVKKLRE |
| | | CMLEEAELNEFKEDKYNSVRSKLYKLFDFILVHHYKNDSSPESTALKNLLRTCLTDEEKEKVYVQTAKELTALY |
| | | SYHFKEASVSVNARNIKEYQEKAQVYHISIADKISSTGIGLFSQLIYMLTLLLDGKEINDLLTTLINKFDNIIGFLDI |
| | | LDKMHLDTEFKKEYQFFNQENCKYTAKELRTINSLARMQKPSANAKKVMFRDALRILGMDNRSDEEIDKELDR |
| | | TMPVGADGKFIKGKQGFRNFIASNVIESSRFRYLVRYNNPHKTRELIQNQHVVKFVLEGIPDTQIKRYFEVCKDK |
| | | DTPDTSSKSAQIDVLAGILTNIDYKIFEDVPQSAKINKDDASRNRAEALKKQRYQAIVTLYLTVLYLVTKNLVYV |
| | | NSRYVMAFHCLERDALLYGVAFPPVEKKWGKDYSQLTASLLKDETYTTYGHLKNQKGHRKWHVLVSRNLEN |
| | | SDKKAVHWFRNISAHISVIRNINEYIGEVQEFHSYFELYHYLVQKMIAKNNWYDAKSQPKTAEYLENLEKYHTY |
| | | SKDFVKAYCIPFGYVVPRYKNLTINELFDRNNPLPEPKEDKEKKEV |
| 73 | JW13177 | MKKRLSNPPARRQDSNPPSACKLYLTSFGKGNDAVLEQQIDTAADYAVSPISAEPSLTVTEAAEARVKFDSKRP |
| | | NVKKIQLTADNPLHHSAGNPASTRRDILGLKNALEERFFGRTFDDTIHIQIIYNILDIEKILAVYATIISAALNHLMD |
| | | ESSDVSQSDVIGNIATQNPYAIFKDPQSRYDYRDPSLTPDQRKDATRIRKKIDANRAAFQALLATGRLGYFGFDY |
| | | KPPRKDEKDKKKIKAAETQEKRLYHLVALAGQLRQWSFHGGDKPEDELWLYQLDSQLVGERKEFLDTLDYYY |
| | | GDRFREINDEFIEQNKINLAILEELYPKEDFPEIAALYYDFIVVKSYKNMGFSIKKLREQMTTLEGASVITAQNMD |
| | | SVRSKLYKLIDFSLFYRYYKDEARRQRAVNILRASTTDEEKEAFYAAEAEWNWNYFRGRFTDFCLKIGDWVKM |
| | | DVDASRWNGILDLDSYRRTSSASYFSKLLYAMSFFLDGKEINILFTTLINKFENIASFITTAKELSIDVTFHENYAFF |
| | | NQDCDGYAREIDVVRNIARMKKPVPGARKTMYRDALTVLGIPEHMQADMFDAELEKMLEKPKDEKGRKLKG |
| | | KNPFRNFIANNVIESTRFIYVVKFCNPDKVRSLVNNTVVTKFVLGRMPETQIDRYYQSCIANPDSAAPLAARIDAL |
| | | ADMMRNMRFEDFKDVQQKSGDPIENMRKERFKAIIRLYLAVVYQLVKNLVNVNSRYVIAFHCLERDCQIYTGK |
| | | SVSKSKKYFTLIDVLLEEGDSSRSGYLARNVRMREHIAHDVDIGKSLIITTKSTDSATGEVKYSKLRIIGFYRNNIA |
| | | HLTAVRSFADYIGDIARIDSYFGLYHYIVQRLLQSRDYTAEAFPDRINPYYASLDRYHTYVKDFVKALNSPIGYN |
| | | LPRFKNLSIQQLFDRNELQPEPKDDKAEES |
| 74 | JW13178 | MAKKKRMSAKERKQQQINLRIKKATEDSTKKVNTTVAVNNKPISKEIKKSKAKLAGVKWVIKANDDVAYISSF |
| | | GKGNNSVLEKRIIGDVSSDVNKDSHMYVNPKYTKKNYEIKNGFSSGSSLTTHPNKPDKNSGMDALCLKTYFEKE |
| | | IFKDKFNDNMHIQAIYNIFDIEKTLAKHITNIIYAVNSLDRSYIQSGNDTIGFGLNFNIPYAEYGGGKDSNGKPENK |
| | | SAWEKRESFIKFYNNAKDRFGYFESVFYQNGKQISEEKFYIYLNILNFVRNSTFHYNNTSSHLYKERYCKINPKN |
| | | NLKTDFEFVSYLNEFVKNKFKNVNKNFISNEKNNLYIILNAYGEDIEDVEVVKKYSKELYKLSVLKTNKNLGVN |
| | | VKKLRESAIEYGYCPLPYDKEKEVAKLSSIKHKLYKTYDFVITHYLNSNDKLLLEIVEALRLSKNDDKKENVYKI |
| | | YAEKIFKAEYVINPIKTISNLFAEKGDKLFNEKVSISEEYVEDIRIDKNIHNFTKVIFFLTCFLDGKEINDLLTNIISKL |
| | | QVIEDHNNVIKAIANNNDAVYKDYSDKYAVFKNSGKIATELEAIKSIARMENKINKAFKEPLLKDAMLALGVSP |
| | | NDLDEKYEKYFKTDVDADKDHQKVSTFLMNNVINNSRFKYVVKYINPADINRLAKNKHLVKFVLDQIPHKQID |
| | | SYYNSVSTVEEPSYKGKIQLLTKKITGLNFYSLFENCKIPNVEKEKKKAVITLYFTIIYILVKNLVNINGLYTLALY |
| | | FVERDGFFYKKICEKKDKKKTNKDVDYLLLPEIFSGSKYREETKNLKLPKEKDREIMKKYLPNDEDRKEYNKFF |
| | | KQYRNNIVHLNIIANLSKLTSTIDKEINSYFEIFHYCAQRVMFDYCKNNNKVVL |
| 75 | JW13179 | MAYDKPRPKRRQARSDFYITDKAIMGGYFNLAQLNFFKTLMEIFTKAGIDVSKIRQDNSPKYLMILIKKLSQDDE |
| | | TIDDKKWADALDLSNECLLKLQQLLYKHFPFLGPVMGGEASYNIYKLKDGHPEVKVANDVMRGVKLEDCLAV |
| | | LRHFALCLNDCRNFYTHENPYNSIDAQKEQYLSQNKVAVWLDKVKDASRRIVKQNNQLTSQDMEFLTGIDHM |
| | | KPQDKVDEFGNIMTDRRGRPFKEFVEYEDYYFRIRGKRYLVDAAGTKLVDQEPRNALSDFGVVFLCTLFLENDQ |
| | | SRRMLDELRLFETGPYDGSRDGDEFKNDILREILLFYRTRVPRGKRLDPMDDTTLLAMDMLNELRKCPMPLYDV |
| | | LSREGQSFFEDEVKRPNDFTPDVAKRLRSSDRFPYLALRYIDLNKCFDNIRFQVQLGKFRYKFYDKTTIDGEQVV |
| | | RGLQKEVNAYGRLQDVERYRQEKYADMLQQTELVETGEEDITIANFIPDTPQSSPYLSDRTASYNIHNNRIGLFW |
| | | NVLDEQEVLTREEKMYLPDLKVDENGKADVFLPAPKASLSVRDLPALVFYLYLQNQHPDLTPAEAIIQQKHNAL |
| | | VRFFEDVSTGRLLPVKGIAELKAVIDRYEYLTIHEIPEKLRDYLAGAVGTEDDDDCADRLDCYAMGILEKRYRQ |
| | | VRARIDQLKEARKMIGDKMNRYGKKSYIDVKPRLLAEQLAQSIVDWQPATDNGRHKMTGKNFQRLIAFLARYT |
| | | DEVPGHELKDLMSRARLLDGPVSHPFLQQVLDKNPLNIEVLYDLYFKEEKLHLENYLEIETNKQGEEVFRKKAS |
| | | VDLSRIPFLNSGRLRFHKRDSAYYQRLAARYLQVDGRQSTILLPDGLFTPHILSVLKSEYHDLQDHLQDQELNQN |
| | | ASYLMSVYLEHVLHDSAQPFYLSNSNDSPFARRYDLFAILQNKKRGVELLPCPLTPVEINRRLTGKTPDDNAKVI |
| | | ERDIKALLDDMARKTEERIRHLPQGFYRKKKNQSQEEMAKLERRLKHKIIDVKKNERTIRRYKTQDMAIFLMAK |
| | | QMLANQLSWQNQEGEVPFKLANVCNDGFLSQTMKVSFPYEVPLKEDKTKKVTIDIVQDNMSLKNYGLLYKLY |
| | | HDERVVTLLQNIVDQQQISFAELTAELSLYDQNRSKAFSNFQQFEKLAFETSKEALTHPEHRGFFLEKVNKKNQV |
| | | IRYERRNNFDALLDLLDAIEAHQLDPRERQWLTSVRNAFCHNSYYKIDMQQIEKKLPTIIQQIVEIVQRITDKASH |
| | | PSNR |
| 76 | JW13180 | MARKLFSNETRPHLAAYFNMACHNAFVVLSRISEKASKSCDQRLEMKLSELPVISLFDTKKPEEKEWIMNRFEK |
| | | SFPFISPAMKMNKISEAGYDDLQCSSRPYVRTTYAMKKCIVDIFNMLNFFRDKYTHYVFNDERNDNAEYRDIQK |
| | | RVVEYLEACFTASCRIVKERFLLDKELEFLTKGRYERHGAKCVVNTRSPFALRDEQGMLSDMGILYFLCLFIEKQ |
| | | YVSMLFDQLGYKGYAIYENHSELRRKYIREIFSVYRIKLPRERIVSESAIEALGMDMLGDLKRCPEVLFKTISAND |
| | | QAKFRIKAETSGEETLFIRKDSRFARLALQYIDEKEHFKNIRFHVSLGEYRYKFYEKRCIDGDTRVRILQKDLNGF |
| | | GRLAEIEKLRTERWGKYIRPFESIRIDDVHTRPYITDQRAKYLFNGNRIGLCFNTKDAQVMSAGVYMPAIDGDNA |
| | | PCVQPTCWLSVYEIPAMIFHLLLCKEDDALENTRGSDTESIIKNYVANYKRFFDDWAKGRWRRSGDAAKDFADI |
| | | ETEYSIKQRDLPQKVCDYITGVKGKPLQEKASAIVKAMRAENEEMIRRFDERYARAISPDNKFGKRSFIEIQPGRL |
| | | AAFLAEDIVRFTPSVDGKDKPTGKNFSVLQSAIAIYSLRKGYDMLDELRRIFLSAGIIGQRQGKNHPFLDKVLADE |
| | | PQDTMQLYRAYLVQRDVYLRRVNATKTYTSAYFIHTTRAKWAKRTDEYYNSLAKRYLSQPIELPRRLFEDDIKR |
| | | RLIKRHPDMAACLQQERCNVAYMINCYMQQVEHDGVQSFYAMPRRYSCFADDTYRTVDEMQSYSHIDLLSHY |
| | | LRECKNNASEEAPYIEADARRRFHALYKKYDDNERVIRRYMVQDILLFLMARDLLIKIKTDKKSFEEYRLQKVT |
| | | PEGEGILEYKVPDFAVTLTFANGEKRTIRQHNLKVKNYGDFFKFMYDERVKTLLPQVKSLEIDREVLEQELQHY |
| | | DSSRPDVFRLILKLEQFIVEHFSELKQQRVQFRDILDKVTLNTADKEVLRLLRNAFSHNKYPRLSQIEEYALPGVA |
| | | VSLQHIAEELVTKAGR |
| 77 | JW13181 | MAHRQQWNKNKASDGKKPRKASWQWKQSMTTEMKPVMASYLNMARHNVYRTLIHISTQMQIAEQGDEDKL |
| | | AKFEIWKKLEKAPAPEQMKLIKLLQKHFPVLQAFFNYEKKAGKVMVDTSAHDVRHFFVKQLLPTLSRIRNEYTH |
| | | YAAKPRTQKEEGELRPYLRQALADSVPAVFDRFAVEVVEDNKCKKKKPTQPKVVSEAVKKIFPEPFDKKGNKK |
| | | SIYNLVSGDAFSDLGIVFFTCLFLERRYTAMFLDALKPWPESFNEVQRKAVFEVFTYDHIRLPREKYDSVTPDYA |
| | | LGLEMLNELQKCPAELFDILSSKDQERLSVDIKSDDPDVVTDDGVTVKGGKVQMKRVSDRFARMAMMYIDRT |
| | | NAFKNLRFMVHLGNYRFKFYMKQCVADKEADTLRTLQKEINGFGRIDEIEAARRQMYAPMFKATVKKENAAG |
| | | VEVEELQPDHAGMKPYMTDTKANYVFDNNRIGLRAIGGDREPRLYLPSLTENGEPIDDAKQVKLYTPNAWLSV |
| | | YELPGLIFYKLLCDTYPEQAEKLGDAEEVIKSYINAYRKLFKNIRDDKFDGWDEKRYSPLTLEDLPVKIKTYILKP |
| | | EASVNPLFAKKAQIVIKEMVEATEKEIERFNRKLDRLTDREVRPDKKTDLRPGAIATRLSRDIMYFAPKSEAKDK |
| | | MTSANFNSLQSALALSKYSVKRMRGMVDELGHPFIGEAFDNYAATNFKIYDFYKIYLESRLKYLKSKQGLGKAE |
| | | LEKLPFLHPDRAKWQKRDKKGIQELAGRYLKIGEVDFPHGFELPRGLFTARAEAIMREAGVLTEPAGDRKPSMT |
| | | NLINHYFEHVLEDDNQPFYCWSKHYEVFDRLAAKKDDKHPTPQFLSPTQLCEKMKVRKRLRPSKFMLNKALES |
| | | VNNGLPDEEHIKDIYDYRITSLAKERLKKDYAEYDDNERMLRRFAVQDKLIFLMAKDILLGVGGIKKEALGKFK |
| | | LKDVMPGAKDSILETTVPFIITLTVGDTILTIRQKEEIKIKRYGEFYRYNSEPRLKSLLPYLTKKIGGNADAKLEIDR |
| | | EELEDELSRYDLKRVDVMSMVQTFEKGIIKQAGKAGIRIDDDTLINFNNLITKIGHVPYEGQGKILINIRNGFCHN |
| | | EYAKDISIPEETSLPEIAEQISTLFDTTRKRPTTKE |
| 78 | JW13182 | METTINNRIGKGEYYTEESKEFLAAYFNQAIHNVFIVLNHIAKRFGMDELSSDEELKNWLIGRQREKKRNAIDRQ |
| | | RFLELIDRHFPFLRIANADKKDAKRENDLEDNLALLITLLNDLTERRNKYSHAITHASIESNDRELVWRLYSIYDA |
| | | NINLVKRDYFESNVHTEINEDPYEKQVEHLRRFCMNNDRTKVDEKGKKKPAMPNPRFRTPFLNAETNQLSIYGL |
| | | VFFVSLFLEKKYAIQMQKNVYGLKDARDTKFKMTNEVFCRSRIIMPRVRLHSDKSTDALVLDMLNELAKAPEV |
| | | LFDQLTDPFKEKFYIESIDSLEESDIITPVRAIRKQNRFMYFALRYLDESNAFSKLRFQIDLGNYHYHLYESKINDQ |
| | | TESRHLTRKLFGFGKLIAFEQEFAPEEWKMKSKDLDYYEGATQPFIAKTYPHYHLEENKIGILFNGQAEVQWPHL |
| | | DVEEHESFPKYKRRANEKADAFLSGNELLAAAFCHHLYASIGKPNTVEKIIRDKYHALRQLFSDLKSGNLQNLL |
| | | GDNTSNEAISQLLFEKYRLTLSEVPVRLHAFLSGQEQADTKAIARGKLELMAQQNKKRIERFDAMKKAVVKVG |
| | | KAQYRTLRSGDIGDWLVRDFMRFQPIGYKRNQAGKQEPDLKSKANPKKYQLIQKSLALYEQEKNNLLGLFKSC |
| | | NLLSSENEHPFLNEVVQSMPATWQDFYERYLHARSRFLEKCIEKGIKKNSYQACYSFLKIKPQLKDKEKLYQGW |
| | | DAQMNLPTNMFIDAIHDWFRQTHHESLRTWFTQQEKPHQLIGLIRKYIELAHTDQIQGFYDMFPLRYDFYKKEFP |
| | | NGLVLHERINKQKQIWEAQLIQTKKRLEDAASKLKKVKQQVESLPDQELRFRNETEAMVYFTKLFDSSIVKNAI |
| | | LKLQRDQKALRVNTIGEKIIKIYTAKYDAIHQEVRDFKSMLTTEKMIRRVKAEDCVTLFMLTDLMNQSQITIGQE |
| | | QRTIKLSDIQPMGETQIQGILDAVQVLEQKLDFFSSDEQGKISQVKLGEWTIFSTDTKVKKQGNFKQLLKDRRLN |
| | | NLAHYILPDIAGGAIRVRRNLLEMELDQYDRNRIPIIKLMYELEYAIYKVDPFSVELKYKKFSQCLREYAQKAVL |
| | | NVEQVEHLNVLIAIRNAIMHNQYPNRDHLKAIVPFTVSEYAPVQEGLTIARQLLACAQVSVNIILSTISKFE |
| 79 | JW13183 | MNEIKQPNNSKYVYAPYLTMAACNIDAVFYHLEDIFNHKQNNAIEIDDGITQLYKLKIFQDLGISNGSNDENTPV |
| | | DFLRKDAIIKQICRNIPFFNILFDSKIFSNKSLDERCRCVDRYIRALFDMRNYYSHVLHEEIDITHQIPNIENDLNYIF |
| | | EENRNTVKKRFVLNDDDIKHLKVFHKDKKGSNSYYKFLESGDHCDKLTVNGLLFFTCMFLEKRYAYELLKKHY |
| | | GFKNSSSKMHKATLETFTVTCIRLPHNKLEVSDSKVTLGLDIANEICKCPDEIFSLLSIKDRNKFRIPIDKTDPEQNI |
| | | NEDCEDNDTQTILQKRYSNRFPYFALRYLEFMNHLPDIYFHIDMGTYFYDCYKKQLIDNSEIKDRRLSKNILCFD |
| | | KMDNAVKTFNDSKNSGLYAAKYDEKNEYRNNTFPHYHINNNQIGISLEKYIPELRGKDTRLRKPDALLSIYELPL |
| | | IVYLCLNNKGEDVTELIKNHINTSKLFFEYVASGGRYSIDNENMIIFNAGNKINSHHLPELFRKDKLNYKDLASKA |
| | | LKNQREKAQNIIDRYYTTKDRKGKILKNKRSLKTGHIADILMEDLMRFQPSIEYTAGKDKVSSPNYQALQKAFA |
| | | YIGSRYMEIPNLLRKARLTHSENSHPFIDKCISPMPKNINGFFKRYLEEKIKYIDTIVAKGDFTNAYFLRDYIKKYG |
| | | ADLETERRNAAHNLIDKPADIPRGIFKDLFSTEYASPTYHIYKELLENEDDVQDFYHLKLNFPEYINDKQKYKVY |
| | | QKINFIRACDIVSFYMMKDLIGIDNSSVKLMSSGGDKHILNLSQNVDIPVMLLRTIGKGKNTKTKINEQIISGKIKI |
| | | KDYGKFRRLIFDKRLFSYSLYFNKNEEGSEKDKLIFDDIEFEFTEYDKSRLKIFELIHKFEERVIIKNAIALPVPSNS |
| | | DDKKNKKYSYISFPDILKKSGLNKENMELLKNIRNAFSHHEYYVVKDLNANKREITKKLYDKCEKDIICITNSI |
| 80 | JW13184 | MLIIKPYGRSQTQHASDSQRNRLHLPSGQAHAEAVEQLQNNLDFVMAQWISVIDKIIRKQPQRSGKGDKKIAAP |
| | | QVSTTQFNARKALGMAALQCIEKEFSELSDLQKKQWGWKVHPYDCTNLVEPQPKDRITGRWYSRFVGAIHPQD |
| | | ITQQTVPAIVQKIHDHLYQQALRPNASTAVHTQGHTTHQLHTIARNVHALKTPKASTHVSSDSAWQSYFLSNDV |
| | | VACIYKELQDKHDQKDKTKHQSQPKPLIPTTTPKAPLFSDRATIAQHLFNHYAKVFATPSGTPTPVKDLLNEAHP |
| | | LHAQWLVHQCIKATYKALFDNASIKGLKHIQHKLPANSEAMRQLIENRRKNHDIGHLVRLGKVLHYEAAERGQ |
| | | LPRACWGEISTPAVAEGSAYWLSEGQAEIKRSEALVRSFKQAITHAGHTLSQLSDWSGNGDIFLNASEAAKQAD |
| | | AKTVEQRVALLFGRACSDLFPSCYAPSGNLQAAIQALLAQSIEAWAQLRHASFHFKGKHVFLEKLQNSLAKNNV |
| | | STPELDAVAQKLWEQDGEQRQKRIRASLEAAHCLDHLSQAQLNAVYLCIAGDKQTRIGSSLDMPRLNRVLNRA |
| | | QNTKLGMKPLTDGAPTLQLSTPAKRQTLENSPAQRCRYVLLKLLYEQDFAAWLQDTRQETIDKWIGGAIARNT |
| | | KAARELNGKGLQPQTTIHAKAERLWHEQAQAPTAKSTSQANPIARFFHDLAAATASEFRVQRHYASDGEQAQA |
| | | QAAYIDDLKCDVVARAFLTYLKNKWPWLLQDLAVQNTPSCMDALPADAHEALQLDNLWQQRLYFLLHMVPV |
| | | GVVSQLLHQLRKWQVLSTQAEASKTAVEDQALYTHCLQVMVLYLDMHDAKFDGGTAIHLDDTHRQPLKDCF |
| | | KRVEDFAACLPASANPSQPGDAHIPLRGLREMLRFGGAKVLAPVFRQHPISAAEYADWQKLQAVIKEAQKTRE |
| | | DLHAEWVKNRKGFTGQQAYAQALETCMSHRHLAHRVRLVDHLQLHSLLMAVLARLADYAGLWERDLYFVSL |
| | | ALCYHEGLDPAQVFNESGNHGNYFDGGQIVEALRNESSPSKSIQTQVAMLFGTDCKKGDPMVNIRNALSHFNM |
| | | LRHTKHQTAPAPIDLTHWVNQTRRLLAHDRKLKNAVSKSIMELLEREGLVLTWQTNHQHQLELSKVDSKKIAH |
| | | LGAKQGTEPHHSGAYCAMVRQIF |
| 81 | JW13185 | MLVIKPYGRTTTTVESNAQRKLNRKQTPWRADDVGTLNQEHDFLIAHWISMIDKIICKPKAIKAAEGQERKRSQ |
| | | PGKATTLQRDVRQLIGDAALDFFNPKPNREIWQWKLHPYEVGDAPTGQAAPNIKGRFYKAFVGHGVEPHQIDA |
| | | TQAKAITEKIRAHLMTAALKQQGNNPQSAQSESRLGRIAHQLGTITQNVHHKKDLEPHALDEAAWQTYFQKGD |
| | | VIEQIAKALAAKYNKSDKSKQPAQPTLTDRATIAKFLFEHYALVFGKTTQVRDLVREEHPLHKQWQVHQRIKAT |
| | | YKAMFDNASMKGLKGIHKRVPKDKKEMWGRIHQRANNQSVAHLVRLGKVIHYQAAEECKTVRAAWHTLQTT |
| | | LDASPYWLSDGQAEIKRSEALVRVFKLAVSHAGRSLSDLTQWEGGDIFDNEDKASKGAVAQEFGERMKTIFGN |
| | | DKESVFPSVWATDDALSEEARQLLEQTIQAWAQLRHASFHFKGRDGFLNELKRSLSSEPHTLAYPALDQLSKKL |
| | | WDEDIITRKERIKKTLEAAHCETHLAQHQLESVYKTICGENVTRYGSTLDLPRLNRVLNRARNADLKVDTTNAQ |
| | | VSLPMPAKNEVLEKSPSARCQYVLLKMLYEQGFSSWMQEKNLYEVDKWIVRAIERSNIAAHAINGSNKNNKQPI |
| | | ESIQARATRLWQSIGQKTGHDFSNDLLDGKSPIAYFFHQLAAATATEFRVQRFYESNGEAAQEQAAFIDDLKCD |
| | | VVAIAFAKYLGSKFSWLLQGLDGTQTCSINDLQKATTTASVEIWQQRLYYLIHFVPVGVVSRLLHQLRKWHILT |
| | | AKGKDRAPTPDNLYAQCAQVLVLYLDMHDAKFDGGTAHQLDDDLLKKLKSCFESEADFATLFPQGAEADSRIP |
| | | LRSLREMLRFGALDTLAPLFEKHPITHAEYERWQALQGQIDDAQNLRAELHSQWVEHKRNFDQVLQYQAALKI |
| | | CEAHRHLAHRVRLIDHVQLHNLMMAVLARLVDYAGLWERDLYFVTLALCHHHQIDLNSLFAHTDKHGNCFFD |
| | | NGQIVKALRKAESDECFTKVHTTLSALFGETYLGGELNGLRNRFSHFNMLQKKESASINLTNEVNEARALMVYD |
| | | RKLKNSVAKSILELIEREGFKLSWKTNNEHLLERASIQTKRITHLGNKAEEAHHSSNYCTMVAHLFGTT |
| 82 | JW13186 | MLIIKPYGRTRTEDNESSGRQRKLVGKQIQLQSEPVTVIAEKNEFLMAQWISIIDKIISKSPVKRIIEGKIKPCIAPTQ |
| | | RQARERIGQAAIKFQPALKELEANWKAKIHAYKITRTVSSGDPKDRIKGRSYAKFVPHGIEPEQITTQIAEEIAKKI |
| | | HDHLNHHALNSKGTGGKGKGSIAHQLGSIAQNVHQADKESGQEPSEVEWQKYFDHHDVVAAIAKAIQSNRPAR |
| | | TKPTLTPKETANTGQSPSDSPRRLTDTATIAKHLFDHFGQVFGQNAKVKDLLKPSHPQHGLWQVHHRIKATYKA |
| | | LFDNASVKRRKNMAIHMPLNKEAMMALVRHRTSNQDLNQLVRLGKVIHYEAAACGQSVRSAWSNIRPNIDKS |
| | | PYWLSEGQSEIKRSEALVRVFKLSVSHASRTLTDLCQWQEGDIFLNSEDASKKLIPDRFVQRMQTLFGRDQDAS |
| | | DPVIPSAWHSNGQLHDDAQALLKETIDAWAQLRHASFHFKGRNGFLTQLTQGLSRHAGSSPPSKVALDTRARK |
| | | LWDRDHLARESRIRSTLVGAHVETHLNPVQLEKIYTCITAKDTNRCGITLDLPRLNRVLQRAHNTLIAQENDDQI |
| | | LKLPQPAKREALEQSNAARCQYILLKLVYEQGFSDWLHAKGIKELDKWVKLAIKRTDESAQRLNTPYSDDLPV |
| | | KARANELWQQHVRTLSTSDALGGMSAIAYFFHQLSAATATEFRVQRHYESDASAAQKQAAFIEKLKCDVVAIA |
| | | FSKYLQKDFPWLLSDLDPTQSCCVSELAVHNNATPVELWQQRLYFLLHFVPVGAVSQLQHQLRKWHILSHHGA |
| | | EHESSSLGQLYASCAQVMVLYLDMHDAKFDGGIAYLLSDEQRKQLEDCFELSEDFQACFPKGSVQDSRIPLRAL |
| | | REMLRFGGIELMNPLFVQHKITHTEFDRWTQLQSCIEKFQKSREDLHQKWIDHPGDFSKQDKEAYGQALKICEE |
| | | HRHLAHRVRLVDHVQLHRLMMTVLARLTDYAGLWERDLYFVCLALCYKKNIDLTTLFNHEDKEGHNFFDDGR |
| | | IVEALRKVKKDFQFPLFSEDPSLLLISGSTKLAGELVFIRNHLSHFGMLSDQSRSKSTQLPNLTDEVNKTRQLMAY |
| | | DRKLKNAVSKSVIEILQREGLRLVWQMHDHTLQLDPNEPIQTQMIKHLGDPSSESMTESMHSKAYTQMVDQLF |
| | | GNKQLNSQT |
| 83 | JW13187 | MDRKYMTLDDKYYFAAYINMARHNVYLLLADISTRMGEKVPNDDAKLIFPILQKLEPKTTTGKNSVSPDEQLKI |
| | | IKELHKHFPFLKTMLYAYKKPMGAATEEEIQKMDYAPGDYYDLFTLFFKVLNDYRNEFTHTISQPNVKILGTEEF |
| | | RVSYVFDFPANLLYGLRVTFDTAVRKAKTRFNFTPDDTKHLLRQGKGGKELVGFKYKFQAEGSKSLTIHGLTFFI |
| | | CLLLERKYATLFTQKLQGLKDKRSRGFKATYEVFAVHCIRLPNARYTSDTSNGALLLDMLNELKKCPTLLFPQL |
| | | PAKGEQNKDQDAFRIKVEDMPGMEEEGDSGFVLLKRHEDRFSYLALRFMDEVKWFNLLHFPVDLGNYHYHLY |
| | | DKIVDGLPRIGSLWEKMIGYGRLPDYQHKFLNKDYPAEWQLLWQNHELKKENENDKSSYMPPTMPHYHFPDG |
| | | KADNIAIKITNPETLFWPAIHIDGNDKKAGKPAKKEHPDLLLSKYELFAFIFYGLLIGKDRIKKELEDKLVQYFNK |
| | | RKQLYRNIINGKLLPLALPADIPKPKDKGKKPTGYDQRKELLNQKLAIYGCTADELPDEIKCFLMGVITESFEIKA |
| | | RYRLEDLIVDTEILQERIKRQLKEKRKPGSKKDVEIKAGVLAGFLAKDIMLFQPADKTEGVKASGKPTSTLYNVL |
| | | QAKLALYGANVDTLERTFNECGLLSGSTKHPFLGQVVSRKPATIVDFYMAYLTARHSYLLKCETDKNYQAYQ |
| | | WLKNNQARKKTEPHFGQRLAAEMEKLPVVIPRGFFAESIKNELLALNNDKLNAAIVSARTPNTSFMFMAYLKEY |
| | | LDDDVQDFYGWPRVYKIFDNFHDKRTKSEMRKSLKPEPLSEEARKGQMDELKKWIKETPNDEDYGKFKKRYD |
| | | DFESNEKQIRQLKVQDITTFAMCDYLLKNINRNLINSDGQFYLKDIAPKGDKGILDKPMSDFGRVFDYCCTSKDF |
| | | AGVEITIEGKTRIFQDDLKVKNIGDFNKFIKDRRLPNLLAYLQKEQIHRAELEKELERYDIVRIEIFKIIHEFEKAILT |
| | | KYPGIDGKDFDNIISHFQQSNNLPELTAMQIKKIRNAFSHNQYPDPIYFLNNEDLKLIGTTGVELYTDYFFNFIKTI |
| | | LVSEN |
| 84 | JW13188 | METPATPNYKRFDYESDKAFYAAFLNTATQNVFIILRDISESLGLGFDLSNDDNMLNVNLWNILQSNIEPELSLHII |
| | | EKIERQFPFANYLAKNYAFYKRKERTAEPNDYCKVFEMLIGQLNSYRNYYSHAVHDYVQMDPTIIKGMQVLFD |
| | | AARREVKVRFALKTKDVDHLVRLSSRKVFGKNEAYEKETFEYRFLDASESITEKGFAFFICMWLQRKNAQEML |
| | | KKMTGFQKSDSPSQKATLETFTFYSARVPQPKLTSDNTKEGLLLDMINELKRCPKDLYPLLSNTDREKFKSIETD |
| | | KDTSFEDEYEAMPILKRSSNRFNYFALKYLDNSFEKIKFQIDLGNYCFHVYDQQIDGVVKKRRWIKKMLGFGVL |
| | | EDFADRNRPDEWKEKIQKIEGRHHKSDDVYVEETTPHYHINEQNIGLKIYDNYLESKKERKIWTPLPEFAKEDKQ |
| | | RHNETKPRNEKPDCWLSLYELPAMVFYQILFQRGYSVLSAEKIIEIHKERIERFFEDVENSRLNPGITNDALLAELE |
| | | RRNLEKSFIPKAIINYLLSKTTESFESLAEKRLNELRLETIDYLNIIKRQRIHFMDKPGSKNYIEMKSGEMANFLAH |
| | | DMIRMQKPVGKEDGKANSTEFQLLQAKLAFFTVNKSTLFETFKLCNLVDAINAHPFLFNINISECNGILDFYINYL |
| | | EQKVAYINLCKREKRYEDYHFLKIGERRRSSGKEYIGKLSKELKDDAVMNLPRGLFLKPILEALDSKDKTKRLVT |
| | | EFKKLDRINAAFIIEKYFAYVKADKPQEFYYYKRSYELLNKILDNRKDFEKRKTIAKQYFDTNELTQMTGKIEGN |
| | | PKENPITRLLPVLVRNHIFNNRIKSEDEKLRVKKVYFEKYKDFTESEKQFRLAKTCDIVLFMIADDMFRKNFVVD |
| | | KSILKNKNKVSVQDAVEIGKGYKLSEIKPNSDEGFLSLQTRVELQIQDKTIIKEQIKIKNYGDFRGLLKDRKIGSLL |
| | | PFIADKEIQFEALQKELEFYDKARIDVFAKIFEFEKSIIAKMNLQKNPEGFINHKDILKSLISENDERFILVMQLRNA |
| | | FSHSNYPDYSLFKDKVADYGFNDLKNHTSNDDTILVKSFAVQFKNLILSYYDELSRI |
| 85 | JW13189 | MRIPQLIAQNKPVFGTYATMALKNVQIVLDHIQKIESLQDQMPERRPEDFWVHPVMQFFYSERYATNVDPEKAD |
| | | AIKERLFRNFPFLKIMAENQRDYRCNKDHKGKRGYRNNNIDSSNLEINGSDIYYVLNNMFRVLKTYRDNTMHAI |
| | | IKDDKIDRNDSPFLEKNESPLSFTINNYYTVALRNVKERYSYETSDLAFIQDYRTDKRTLKTDFNFFLSMQALNG |
| | | DPTGRIHLSGVGVVQLICLFLEKKYINLFLSKLPALWGGYDESSEEARVIRRSLSINSVVLPKERIRSDKRSMSTAL |
| | | DMINELKRCPRELFDTLSQEDQDRFRVVSSDYNEVLHVRHSDRFAQLSLQYIDSNELFKGIRFHVNMGKLRYLFS |
| | | ANKSCIDGGVRVRVLEQPLNGFGRLDEMEQYRRQNDTTYGDSNIVIRDFENVQRDAACADNYPYVVDTYTRYL |
| | | LNNNKIEMCFSNDKVVPDIELDGGKWYVGKTIPHCRLSTLELPAMMFHMHLLGAEKTEQRIKSVYYNYKKLFT |
| | | GLKEGTLTKENIDSFNICRSDMPQKVLDAVSGEDKTKRVSSYVEDTLKELLEETARLIKRFEETRKAIGSSANKQ |
| | | GKRNFKSISSGKLADFLAKDIVKFQPSLEKDEYYGTDRMTGLNYRVMQSSIAMYNSMGDKKAMQDFYNMFKA |
| | | AKLVEDNKKSHPFLAVALKRIPKNAIEFYEQYLKARKQYLEKKIVEFNKTEHVRMFAANLPFINIERNKWASRD |
| | | EDFYQILGDSYLEVSPIELPRQMFDDEIKAKLKQKPEMQDIDFDKANVTYLIGEYLKRVHNDNFQEFYDWERNY |
| | | RYMDMLECKVNNKNSIEKQYLTIAEREDAWANREQGVKRYTQWANDKKLSDAKFKNMPETEYAKIVATRLSS |
| | | SRNDYQKSEKHIRRYKVQDAMMFFMVKDSLTKNINFVAKDFKLQDIMPDADKGILSGIMPMDFVFEKKGKVYT |
| | | ISSQGMKLKNYGDFFALVNDKRMSSLLELLPTPQIGKEDIEQEFKGYDDSRVDVVSVILDFEKFVYNKYPDIKNL |
| | | ALQGNHFDFLDMLKELINKGDLTENEKELLRKIRNAFSHNSYPEGGIVEIRTLPEIAKHLIRVFGNSIERIQH |
| 86 | JW13190 | MANFQEPARHIFGSYLNIARANFYKTIFHIFSISGIDCYTQKGDLYFKEDNLDKVIKVFYLISKGESTKDEGTKVSL |
| | | EEEIKASIDTVYEVIKKCYDNRWNNEVKQYTNLTEREKNARKEAFKAPLTDEGPNGEKARIRNTFTIKGEQEERF |
| | | RKMLFRHIPLLAPIMANVVAMQFKKNVNEQKESNKAMHDASLTDCLKELYSIAQCLTDCRNFYTHMNPYNSIE |
| | | KQKDQFKLQNIIAGNLDKAFAASRRIAKKRNSYSESDLTFLTGHQDDCRMQEVFVLDENGKKKWKVEKNEKGE |
| | | TKLDKEKNPIYIYKKVKAKDDKGKEKRDENGKPIYEVLYEDGKPVHEYETKLIEREDFYYRIRGIRQILNPNLTP |
| | | NGEVCDGLSAFGMLYFCSLFLSKELTVQLCTETQIFVNSPYNNDNNKKSNIILNMMFVYAIHIPRGKRLDSECSS |
| | | QALALDMLNELRRCPIELYNVLPATGKREFEDDIKHENDRTPELAKRIRSKDRFPHLALNYIDSQGLFENIRFQVR |
| | | LGSYRFCFYDKICIDGKKHPRQLHKEINGYGRLQDMEKARKEQYGHLFQLSRDESVWQKDENAYVNLRQLVPV |
| | | KAGDPAHITDTLAQYNFYQNRIGLFWNTDDETYLTDKINAQGQIVGKGLYLPPLSAVDTPTTTNRYKRKAPIDM |
| | | PAPLCSLSTYDLPALLFYEQLRRKHQLEPNDFPAAEDIIIRQYENMVRFFTEVKDMGTFDNDDALQEKLKEYGLS |
| | | KASIPQKIYRHLVQKTPDNAKDFEKSAKAELRRRLHIAEAKLSCFDKDKEKMESDKEDDRKYKKYGSKYFISIR |
| | | YAQLARYLAESIMDWTPNAKQGKDKLTGLNYRVLVSSLAGFGTRYSDEDILQILADAHIYVDEKNDHPFIGYVF |
| | | DEYPTDIEMLYSEYLKREIKEIKKYISVGIDAKTGEETITLKKDASGIPFLHHDRKRWQQSSIAELTDRYLHIKEEG |
| | | KAEPGRATLLLPDGLFAPYIVKMLEKCDSSALENCDDKSNAAFLISRYFENKCEKSQPFYDTTEPSHENDELRKV |
| | | TPYKYSRAYEYFKLLNGGKDIYLPITEIKRRLADKERRIDANIKNLTDKGNYQTIEEAREGRRRKLERAVRDMQD |
| | | NERAIRRYKTQDRILFMMAKSMLGDIVNQNADLFKLENVCENNFLSQRVKAQISVKSNNQQITIQKDDMPIKDY |
| | | GKLFRLLNDERTVQLLSYSILTNPPLIDFDQISEELKQYNTIRSSAFKSFQQMEQESFIQHERVLTDPENNDFYQGG |
| | | RRYKNNEQTKENDAKRNNFSSLLKILQCLTPEVMNMFEENDRQLITAIRNAFDHNSYPNWEVCRQLLEQEQQV |
| | | NANIQLELSQVAAFLISKIRNYVKQIEEVCHSSHQ |
| 87 | JW13191 | MPLRFKNSEERKPVLGAYAAMARNNAYIILSDIMERLHIEQPPLPDPAHPGQCLDKEAHLDKLSLFPQNNDLMPE |
| | | TKDKAMKLLCSHFPFLQTEGDLRIMNAPDGREQEKIPITYEEKCRTLLDALAVLTYLRDANLHYLFNDRRAEHL |
| | | EYRLPESKACHLLRLVLKAAPRKISERYKGTGLMPDGALDFFIKKQYVREGRSFKFNMNWLFSPQREPEKREMD |
| | | VYRKVELAGGVERDLVANPDGTPARFNRLSLFGEVLLISLFTEKRYIPDFLKACGLLTDNGFTETTQDGTLSQQR |
| | | LIREIVAAYGIRLPKRRLDITMDADQVMLDIFNELAKCPDELYLVLPEAKKKELEAVNIDGETVIKKRHSDRFVPL |
| | | LLRFIDTNELFPSIRFQVNSGYLRFLHHEKAAYMDGVERPRILQDAVNGFGRIQEVERTRSASDTYLGFPLYAPSP |
| | | DDDAPMSLPCITDSASRYIVNGECIGLSISGDRTPVIIQDGGKYRVRSPLPDCWISRYELPAMGFYLYLCKKYDLS |
| | | VSAEKIIIDKVNEYRSFFQGVANGTITSLKGITLAEKDIPGKLLDYLNGKTDSSDFNRYKKNLIQSLLEKTENRLKR |
| | | FLEDMAMVGSKENRIGKRSFVRVLPGKLASYLADDIVFFQSYPAGHPEKRLTGQQFSILQGLLATFPPDIEDSCRR |
| | | AGLLSGETAHPFLKAVFDSIPAKDRNTLVFYEIYLKRKIAFLKGPIPDSAPFLHPGKVKWQKKDAAYYKALAQR |
| | | YLDGGKDGSNTGILLPRGLFDQAITDVLTKRCPGWSRAIQNTDHANTAFKIITYLLDGQADDYQWFYYEEDRLQ |
| | | EYRFSQLIISQNAVRNGWKDLKAILQEEGVKLKGNYYKELEGRISALRRIPPERLARNTMKREELRQALRSSYDR |
| | | MCENEKSIRRIIVQDIVLFLLARWRLDPREKLNMSMIGQDESKLMNQVVTVDTLYKGQYRIRQNDVRIKDQGVL |
| | | FKTLNDKRIDSLLDQLAVGEGEVIDLEDLIAELTRYDDRRIPVVAKIMEYEKRVLKNHPELRDRSGRMDFKSVQR |
| | | ADEASSPQKKVVLRTVRNAFSHNAYPDRVVKAEGEEGIEIYNPIIPGMADGISGTTNKLVDE |
| 88 | JW13192 | MGKIVKPGEKIREMKETYKFRVNKHPFSIEEVGKNICGAYFNIARQNFYRTLLHIFSSVGIDCYTSKNSLFVKEDT |
| | | MASALEALQAIEKDKNTKEKVTQAIESLYQLVENCYDMEWELFCQKEYGGKISSINAELKKDLSEDLKNQLNTE |
| | | KEKIEKEQQDKQEEFYKDIENEKNRLRQSFILKSEQEEKLRKLLFKHLPFLSPIMADVVAYNNSHAEGDTINNGV |
| | | MKDVTLAECLQQLVTIAKCLNDCRDFYSHYNPYDSVEVQIEQFKRQNDLAIKLDKVFVASRRKVKERNQYTET |
| | | QLEFLTGKLHYRNLEKKERDNNGGKNKIPEERRYYYYRIRGERKFKDVENFEDYKDKKSPAMSDFGIVFFCSLF |
| | | LSKEYTTLMCNQLELFDHSPFTEEANNIVHNMLYVYRIHTPKGKRLDSENDENALGMDILNELRRCPMPLYEVL |
| | | PPLGRKEFEDDVRHQNSRTEEISKRLRYVDRFPSLVLKYIDAQKLFSQIRFQVRLGSYRFSFYDKICIDGEPHLRIL |
| | | HKEINGFGRLQDMEKLRKSEYGAYFPKTRQDNVWQRDENAYVDLVQLVPNKAEDDPQLTNSIAQYNIHQNRIG |
| | | LFWNQEGNSILVDKKGEDEKPLYEGYYLPPLSVVKQTTSEPEKDKNKALVEMPAPLCSLSVYDLPGLILYQHLV |
| | | ATQQGCESVDDVIIHKYQKMVSFFNDIIEGKLQPQDSVAELDKKLKDYYDLSKASVPKKVYRILSSQEFNREEDL |
| | | KAFALNALTRRLRNAIRRKTRFSEDLAKIGQKDNKYGKKNFVDVRHGALGQYLAESILDWQVTFDGGKDKLTG |
| | | LNYRVLASCLAKFGDGNTNLNYIKTILRKAKILANEGEKIANEHPFISKALDNYPDNIEDFYLDYLDAEIEYIKKY |
| | | VDIEESGQEITKVTLKSDADLSKLNFVHSERKRWVKSAAEDLKELAARYLYVEDRNVNGEVVTHRATLLLPDG |
| | | LFASPIVEVLKKRYEKDDPIMAALNNENLNHNVDYLVKLVFEKENAGDTSQPYYNSNFEVLPVYNSNTVPDFLR |
| | | ENPGNNKYVRGYELFKAIHGKPIFYSSDEIQVFLSKKITDRNTESPLKIVNRQGEECCKREIHAKIDANVEGVRTK |
| | | GDFDSLEEARNARRRKLEILLKECKESEKTIRRYKAQDMILFLMAKNLLSNAIGESDKFKLSKVCDDDFLDQKIN |
| | | AHITLHLDDYTVKIQKEEMPIKNYGQLFRLLSDNRVMTILSYPSINEATLEYDDLIEELSIYDERRTSVFDVAQKL |
| | | ERASFVQHKEELTNPENDLFYCHNKRYRVNSGRENQPKRNNFEAMLKLLLKMTPQQQSMFSKVEQDFIKNIRN |
| | | SFGHNGYPIRNTIERIANGNDPKFADLKEMQLKGIASLFAGKLLDCLNDNNIE |
| 89 | JW13193 | MKLSLKPDSQLKPIFGAYAAMARNNIFLTVLDVMKQLHIPQEPLFDPRGNELDLEANIWKLSLFVIHLKPEQSSK |
| | | ADKLLRTHFPFLDLLNDIKIGSIKGESFHYNVSFKDTKQLLLNGVNVLSHLRDINLHYKTNDGKINDYYYRKYEN |
| | | VWSNHLIGLLKAAPRVIKERYKQTSLLSPQSMDFFTKDSYLKNTDGYILNPDWLFCPTRKPGDNELYIYKDKKP |
| | | YRVEKERFDRLTRFGEILTIALFIERRYISDFLSECGLLGQFPSSTNDGSISQRRLLKELISVYCIHLPNRRLDISIGET |
| | | QIKLDMLNELAKCPDELYMVLPDTIKTKFEIIGIDGRPVFMKRYSDRYPALLLNYFDTTGSFEKLRFQVNAGYLK |
| | | YVHHGITDYMDGVGRVRIIQDGLNCFGRRHEVESKLKEQFSIHGFPVIRNNEEEANIDYPFITESGTRYVFNGDMI |
| | | GISLYGDIMPRFEQYTENNTVRYRVRNTTPDCWISKYELPAMAFYYYLSKKYNEGVSVEQLLSQTTEQYRKFFQ |
| | | GVSDGTIKSLSDIDIPIKAIPQKLQLFLKGESSHEDYNKFKERVISKMIEETDIRLSRLKDNLEVVFQRDNKIGKKT |
| | | RVRLKPGVLSDYLAKDIVRFQSFPDNHPEKKMTGQQFSILQGLIATFSEELEVSCKRAGLLDGPSSHPFLSRVFSR |
| | | HRGQMRSTIDFYQAYLEERRAYLSGSIPDDAHFLHPNRVKWSHDKQESYFRSLSTRYIKDEITGERIGIFLPRGLF |
| | | LKPALKIIANNCPKTARFLKEQERINMSFLILTYLEEELQDQNQGYYYDHLETGNGEYDFYKIIDREKKEFGDKR |
| | | LGYIIRAERDSCQNSLYFFQLKNAFGHVRESARPIAGTKELAEKLRAAYNKMCKNEKKIRQYMIQDATLFLLSRD |
| | | VVGPAGGQMKLADIDPTGNSVLEQTVDVTTNYKGKTIRQRNVKVKNYGELYSVLSDKRINTLLEYQPKTENSIP |
| | | LEAIKEELVSYDHERVPVITKIQGYERAICEEKPELFSDEDARYDFNDIQNADTKTPNLNKVALKKIRNAFSHNQY |
| | | PAPVVKQGNKEIVIFTHSLPDVAREISSKAGELTNWTPEEGSE |
| 90 | JW13194 | MARTNFVKTINYILPIAGVRGNYSESQINKMLHALFLIHAGRSSELSVEQSNWKKRLTLNVEQQARLQRLLFKHF |
| | | PVLQPMMADAAEHKAYLAKNKKKSDVQTDDDVFAQFKGVSLAECLNVVALMADTLTECRNFYTHKDPYNTP |
| | | EQLEKQYEHQEFIALKLDKVVVASRRVLKDREGLTVGEVEFLTGIDHMKQVDKKDEKGNVIYVEDRGTRKKA |
| | | KAFVEYDDFYFKITGSRTAGGKACSALSDFGLLYFCILFLSKPYAKLFIDESRLFEFSPFDENENIIMQEMLSIYRIR |
| | | TPRLHRIDSRDNKAALAMDIFGEMRRCPIELYDLLDKEHGQPFFHDEVKHPNSHTPEVSKRLRLNDRFPHLALRY |
| | | IDEMELFKRVRFQLQMGAFRYKFYDKECIDGRVRVRRIQKDINGYGRLQDVADKRMERWDDLIQKREERPVKL |
| | | EHEELYIDLDQFTQDSADSTPYVTDRRPAYNIHANRIGMFWEESQNPQGFKFFDKNGMYIPVLSVTDDHKAPIA |
| | | MPAPRCTLSVHDLPAMLFYEYLLSQLDQEARKQYHSAEQIIIGIEADYRKFFGAVADGNIKPFASSEKFADYLEE |
| | | NYPSMLLSDIPQKIRQYLSSEHLSYEGKPVTVRERLVEVTLKHLAERMERLERRLKNYTEDLKKIGNKDNKIGKK |
| | | DFADVRHGALARYLVQDMMEWQPSKDGKGADKLTGLNYNVLTAFLATYGTPQASIADSDIAKLSLKEVLRNA |
| | | HLVGGDNPHPFLEEVLAYDNKNIEDFYLNYLTEEVNHLNSRIQSLSSNPTYKALESLPFVHHNRIRYNERTDEEIR |
| | | ALAGRYATIQLPDGLFIPNIVDLLENQYATNTDMQKALSFEGADHLNPTRNATYLISQFYKTVLHDNAQPFYQT |
| | | DKSYTRQQDGQPPVAFSFRRAYDLFTELNNDKEDYFPFELKPLFLTSEEIQQRLTEKRLGKDGNPIPQRENGEIKK |
| | | DAQGNIIWERKITHDVDIFVNTLSNKDLKCSKNEVKEKRDAKREKMKRMVHEIKNNERTIRRYRTQDMILFLLA |
| | | KKMFVDLLGEQSRSVDWKQLRLSKVCNDAFLRQTLTFRVPVTVGDNTVYVEQENMSLKNYGEFYRFLTDDRL |
| | | TSLFENIVDSIEPDKKTGERVISHTDLMSELAAYDQRRSTVFRHIQQIEDIVISGNAILANPDCDNFWVDGKRGEL |
| | | AKRNNFASLLKMIDLINTTSLTDDERTLLVAIRNAFGHNSYRVDLKKIGGINNLPEVANSILKHLETLSGFSAE |
| 91 | JW13195 | MSKNDNIKSKAKALGLKSTFQVGDEVVMTSFGKGNKAIVEKIVRGTDVQSVPTEPNFSAEIEGKKFDLVGRAHI |
| | | QTKSDNPQYSKKRTGDDMIGAKAALEKRFFGGTFDDNIHIQLAYNVLDIEKILSVHINNIVYTLNNIRRKDNAED |
| | | DDFIGYMSTRNDYDTFIEPRKHNISEDAAKSIDKSRASFEEYLQPPVKDCLHYFGNTFFAPREIEKTYTDNRGFER |
| | | KKKVTVNSLIDEKEIYYIFALLGGLRQFCTHDNKSGRNWLYSLEENGINSDAKAVLDKYYNSAVARIDESFVDN |
| | | ASKTNFKLIFNAMDVSDEALQDNIAKAFYKFTVCKSFKNMGFSIKKLREQLLELPEYEGLKDKHYDSVRSKLYQ |
| | | IMDFVIYLSFKDEKFKKDNEEKINNIVNELRATLNEEDKGRVYASYAERMKSELKPAIARLKSDIDKIKDSRVKEF |
| | | ELDASVKYRLSKVVESVRLKDRATYFTKLIYLTTLFLDGKEINDLLTTLIHQFENIASFIDVMNDRGIDCRFSDGY |
| | | KLFESSKQIAFELRNVNSFARMTRTSKDDENATHMMYIDAAEILGTDYTEEQIEEHLNLEKKRMIPGTKKADMN |
| | | FRNFIINNVIKSSRFNYLVRYSNPKKIRALADNEGVIRFVLGELPDAQIDRYTLLCGFNPDADRQEKTDKLAKAIT |
| | | GLRFNDFENVKQGANTEGESQESIDKAQKQGLISLYLTVLYLLTKNLVYVNSRYFLAFHCLERDAQLLGSGAGH |
| | | HEPYVALTQRFINEDKLNEHACEYLKTNIANSDEYTIRIFRNNAAHLSAVRNANLYIDKLKEFKSYYEIYHFLSQE |
| | | NIYGKYCVDKKYVTADENGSKTISVKISKDYCPQVYIDKSLEYFDKLNKYGTYCKDFTKALNSPFGYNLARYKN |
| | | LSIEGLFDRNRPGDKGENTFED |
| 92 | JW13196 | MNFEENGNKYLFGAFLNTAYDNYNEVISHIYDVIRRITNNNPTEQKSSSQALASEEPISSEEKEKMFFVCTILIAGN |
| | | ATSRKIESILKRAFPFWDDFIEIHASLSAQLDKTESIFQLQKNCVEELFTALESWRNYTTHYIHPEAIASPTINLLLK |
| | | SCFNQGIKEIKKRFNTKDEQLTHLYEPELFHNKETNKDEIKCYHPANYYRFANENGLLTEKGLAFFTCLFLYKRE |
| | | SYLLLNQLKGFKRADEERYRMTLEAFTVMRFRAPKQLLKLQQQQLDKVSLGISMINELAKCPKELYDCLENEK |
| | | RRQFEVYPDTETTLYEQEAIGELIRYKDRYENLMLKALEHSSECKYMGFYLSLGKCYMKCYEKHYIDGTTDNR |
| | | YIVHSLYGFGRLQNASTDHKNHLSSFGEELQTHSQLPVCHFATEDDAADSPTSVPYISESYPSYVLNNNNIGIKW |
| | | LNSSEKTEYPNFNLNEGKVSCPAPDYWLSKYELPAMAFYAYLKEKHKNKLQEYPSIKELIDQSHPEATKTSSSTI |
| | | KDRLEERLKRYKVDATKKLKRLAEKPDGVQSGRLADELARDILWLQPSSPKEGGKDKLTGANFQALQYALAR |
| | | YDFMRTELPRILTAARLTGSNNAHPFLDKINPQDYSRLTAYYAGYLTQKIVYIDKQLEKLARGKVNIQFHPTRKL |
| | | IRQSQTDSVEHEKETVFLPRNIFTEKIEQALCQIQGNFKLNIEKARISGKKLNASKLILIYLELYLKDEVPEFYNAK |
| | | RKYPCLCYPLTPSEKYTLKEYQDTEERSKRIDRLKCFYNFKEVAEKVYLHKELSEDENKRYRKYIEVQKVIDNE |
| | | KIIRLRKVQDITLYLWTRLFIEENPEQIFFSKNEKPENSLFKLREMNNAILDNTTSRKININTPNGNVSIEDEFKIKD |
| | | YGRVTALTTEKLPQSLIKFIAILNKPLNKKDRPLLSYDYIYHETNAFYRYRPEIIKMAQDIENKIINDLKINVKPQA |
| | | ESYYNFRRTIQKLENKSRDINIELLIKIRNAFCHNEYKELDNDQYKYLNSLFKLSSDIKQTDTLAYLLYILFETEYQ |
| | | KVMILK |
| 93 | JW13197 | MANTQFKLKSVDYSKPYDEQPECKRHVVGAYANLARHNMTLTVNTIMQAIGMEIFDENNIGDAFNSSHRKKID |
| | | ALDNIQKVNLQKRLYRHFPFFKRMKLEDEDKKSVQLTTLLEVMSDFTSCMAIIRNFYTHYHPYNSPDEKKRQLE |
| | | LKKRMGKRLQFLYENTSQMFKTTEALDHESNEVLSALRIPEDYIEEILPGDKEYDNLFNLINDPRTSKFKKQGLK |
| | | LNQQTKVITRKKVRFVRNPDYQAYMIDETNGMSDVAIIFFLCLFLDKKVSFDMMDEVGFTKQIKFNGPQADRQL |
| | | LYLKEIMCMNRIRMTKAKLDSEMTDTALALDMLGEVRKCPKALYEVLDKDARNEFKDDATVQWETEHGKEA |
| | | VSTEALASESDEDELTDKNTPRSTFVRWDDRFPQMALRYIDYQGLENDIRFQLNLGKYRFAFYQHDNKQSVDNE |
| | | ERLRILQKELHGFGRIQEVEEKKNEKWKELYDEKTVKDGLTQKKPDEAGQAPYITEQYAQYAIDEKSHSIGLRW |
| | | EGWDKKDKSKGHYGDLDKLKMFIPYIPSKPKDEEQQTNQAEDLMAPQAMLNLYELPALLFYQYLLDKYKSDT |
| | | SDAEDIIKTSFTNLVNFFNDVESDVLVPIDDPDENERIDKLSSLLEGYNLQMSDIPEKLRNYLCNKDIDYDLKMEK |
| | | SAIGRLEEKKKQVDKALSSYKDKKKIIGSKDNKFDKMRASIKTGQLATWLIRDIMDWVPNNSSARNRLTGQNYT |
| | | ALQATMALFGQQANSNRSYLESCFRSAHLLPLDGKPYDKNTHHPFLEDVIQAMEDETLESFYEKYLDFETKHID |
| | | KVIKTLENGTDFDDYYKVPFLHCDRQRWAGPDKSLAAQYLKRPIQLPNGIFTKPVFNLLSTIDNKALRKALEESQ |
| | | QANGENPPLANNVAFLMKLYFEFVEHDHSQPFYYTTTSDGNKSHYLHIYRIFKKLYGQPIPHSNKTTVPAYTIDEI |
| | | RHLRKQAIADIEEYVDNEIEKWKRTKQDRFESKLRKKLKKENDKRYKKHEKQLNINEEIQKVVKKEIDTMRTD |
| | | MTSKMKRQLRSVYDNERTIRRFKAQDMMLLVMARNILKAKSNDKDFTDGFCLENVFSDSLLDKPIDFEWKVNI |
| | | KGASKTIKQEGMKMKNYGQFYKFASDHQRLESLLSRLPDSLFQRAEIENELAYYDSNRSKVFRQVYIIESEAYRL |
| | | KPGLQDDANASKDWFYFTDKKTHKQRSIRNSFIQLLEILAAGEDGILDNDEKIALQKTRNAFGHNTYDVDLNVV |
| | | FKGKENKKKIPEVANGIKEKIETQTEELKRRSK |

TABLE B
gRNA sequences

| SEQ | | |
|---|---|---|
| ID NO: | Name | Sequence |
| 94 | JW13101_Guide1_3′ | GACUGAACCUUACCAUGUAGGGAAUUGAACUCCUAAAAUUCCCUUAGUCAGAG |
| 95 | JW13102_Guide1_3′ | GUUGUAGAAGCUCUUAUUUUGAAGGGUAUAACAACUUCCUAAAAUUCCCUUAGUCAGAG |
| 96 | JW13103_Guide1_3′ | AUGCCUUAAUUUUGGAAGGUGAGAACAACUCCUAAAAUUCCCUUAGUCAGAG |
| 97 | JW13104_Guide1_3′ | GUUGUAACUGCCCUUAUUUUGAAGGGUAUAAACAACUCCUAAAAUUCCCUUAGUCAGAG |
| 98 | JW13105_Guide1_3′ | GCUGUAGAAGCCUCCGAUUUGUGAGGUGAUGACAGCUCCUAAAAUUCCCUUAGUCAGAG |
| 99 | JW13106_Guide1_3′ | UAGUUUUAUUACCCCUACAAACAGGGUUAUAUUCUAACUCCUAAAAUUCCCUUAGUCAGAG |
| 100 | JW13107_Guide1_3′ | GUUGUAACUGCCCUUAUUUUGAUGGGUAAAAACAACUCCUAAAAUUCCCUUAGUCAGAG |
| 101 | JW13108_Guide1_3′ | GUUGUGCUUACCCUACAAAAUUAUCCUAAAAUUCCCUUAGUCAGAG |
| 102 | JW13110_Guide1_3′ | GUUGUUGAAUGCUGCAUUUUGGGUAGCAAUUACAACUCCUAAAAUUCCCUUAGUCAGAG |
| 103 | JW13112_Guide1_3′ | AGUCCCCGCUCGUUUCGGGGUGGUCUUCCUAAAAUUCCCUUAGUCAGAG |
| 104 | JW13113_Guide1_3′ | GUUGUUUUUAUUCUUCAAAAUAAGAGCAGUUACAAUCCUAAAAUUCCCUUAGUCAGAG |
| 105 | JW13114_Guide1_3′ | GUUGUCUUUACCCUCCAAACCAAGAGCAUUCACAACUCCUAAAAUUCCCUUAGUCAGAG |
| 106 | JW13115_Guide1_3′ | GUUGUGGGUAUUCUGCAAAUUUAGGGCAAUAACAAAUCCUAAAAUUCCCUUAGUCAGAG |
| 107 | JW13116_Guide1_3′ | CGAAUUCCGAAUUAACCUCGUGUAGUGACGUCGUUCUCCUAAAAUUCCCUUAGUCAGAG |
| 108 | JW13117_Guide1_3′ | GUUGUUUUCACCUUGCAAAUAUAAGGCAUUUACAACUCCUAAAAUUCCCUUAGUCAGAG |
| 109 | JW13118_Guide1_3′ | GUUGUAACUGCUCUUGUUUUGAAGGGUAAACACAACUCCUAAAAUUCCCUUAGUCAGAG |
| 110 | JW13119_Guide1_3′ | UGCUCUCAGUUUUGGAGGGUAAACACAACUCCUAAAAUUCCCUUAGUCAGAG |
| 111 | JW13120_Guide1_3′ | AUGCCUUAAUUUUGGAAGGUGAAAACAACUCCUAAAAUUCCCUUAGUCAGAG |
| 112 | JW13121_Guide1_3′ | GCUGUACCUACCCUGCAAAUCAGGAGCCUCUACAGCUCCUAAAAUUCCCUUAGUCAGAG |
| 113 | JW13122_Guide1_3′ | AAGUUGUCAUACCCCUCCCAACGAGGGGCUUCUACAACUCCUAAAAUUCCCUUAGUCAGAG |
| 114 | JW13123_Guide1_3′ | GUUGUAGCAACCUAUAUUUUGUUAGGAAAAGACAACUCCUAAAAUUCCCUUAGUCAGAG |
| 115 | JW13124_Guide1_3′ | GGACUACACCCUUACCGUUGUGUAGGGGUCUAAAACUCCUAAAAUUCCCUUAGUCAGAG |
| 116 | JW13125_Guide1_3′ | GUUCAGCAUGACCGCUUCUUUUACAGCGGACUGAACCUCCUAAAAUUCCCUUAGUCAGAG |
| 117 | JW13101_Guide1_5′ | UCCUAAAAUUCCCUUAGUCAGAGGACUGAACCUUACCAUGUAGGGAAUUGAAC |
| 118 | JW13102_Guide1_5′ | UCCUAAAAUUCCCUUAGUCAGAGGUUGUAGAAGCUCUUAUUUUGAAGGGUAUAACAACU |
| 119 | JW13103_Guide1_5′ | UCCUAAAAUUCCCUUAGUCAGAGAUGCCUUAAUUUUGGAAGGUGAGAACAAC |
| 120 | JW13104_Guide1_5′ | UCCUAAAAUUCCCUUAGUCAGAGGUUGUAACUGCCCUUAUUUUGAAGGGUAUAAACAAC |
| 121 | JW13105_Guide1_5′ | UCCUAAAAUUCCCUUAGUCAGAGGCUGUAGAAGCCUCCGAUUUGUGAGGUGAUGACAGC |
| 122 | JW13106_Guide1_5′ | UCCUAAAAUUCCCUUAGUCAGAGUAGUUUUAUUACCCCUACAAACAGGGUUAUAUUCUAAC |
| 123 | JW13107_Guide1_5′ | UCCUAAAAUUCCCUUAGUCAGAGGUUGUAACUGCCCUUAUUUUGAUGGGUAAAAACAAC |
| 124 | JW13108_Guide1_5′ | UCCUAAAAUUCCCUUAGUCAGAGGUUGUGCUUACCCUACAAAAUUA |
| 125 | JW13110_Guide1_5′ | UCCUAAAAUUCCCUUAGUCAGAGGUUGUUGAAUGCUGCAUUUUGGGUAGCAAUUACAAC |
| 126 | JW13112_Guide1_5′ | UCCUAAAAUUCCCUUAGUCAGAGAGUCCCCGCUCGUUUCGGGGUGGUCU |
| 127 | JW13113_Guide1_5′ | UCCUAAAAUUCCCUUAGUCAGAGGUUGUUUUUAUUCUUCAAAAUAAGAGCAGUUACAA |
| 128 | JW13114_Guide1_5′ | UCCUAAAAUUCCCUUAGUCAGAGGUUGUCUUUACCCUCCAAACCAAGAGCAUUCACAAC |
| 129 | JW13115_Guide1_5′ | UCCUAAAAUUCCCUUAGUCAGAGGUUGUGGGUAUUCUGCAAAUUUAGGGCAAUAACAAA |
| 130 | JW13116_Guide1_5′ | UCCUAAAAUUCCCUUAGUCAGAGCGAAUUCCGAAUUAACCUCGUGUAGUGACGUCGUUC |
| 131 | JW13117_Guide1_5′ | UCCUAAAAUUCCCUUAGUCAGAGGUUGUUUUCACCUUGCAAAUAUAAGGCAUUUACAAC |
| 132 | JW13118_Guide1_5′ | UCCUAAAAUUCCCUUAGUCAGAGGUUGUAACUGCUCUUGUUUUGAAGGGUAAACACAAC |
| 133 | JW13119_Guide1_5′ | UCCUAAAAUUCCCUUAGUCAGAGUGCUCUCAGUUUUGGAGGGUAAACACAAC |
| 134 | JW13120_Guide1_5′ | UCCUAAAAUUCCCUUAGUCAGAGAUGCCUUAAUUUUGGAAGGUGAAAACAAC |
| 135 | JW13121_Guide1_5′ | UCCUAAAAUUCCCUUAGUCAGAGGCUGUACCUACCCUGCAAAUCAGGAGCCUCUACAGC |
| 136 | JW13122_Guide1_5′ | UCCUAAAAUUCCCUUAGUCAGAGAAGUUGUCAUACCCCUCCCAACGAGGGGCUUCUACAAC |
| 137 | JW13123_Guide1_5′ | UCCUAAAAUUCCCUUAGUCAGAGGUUGUAGCAACCUAUAUUUUGUUAGGAAAAGACAAC |
| 138 | JW13124_Guide1_5′ | UCCUAAAAUUCCCUUAGUCAGAGGGACUACACCCUUACCGUUGUGUAGGGGUCUAAAAC |
| 139 | JW13125_Guide1_5′ | UCCUAAAAUUCCCUUAGUCAGAGGUUCAGCAUGACCGCUUCUUUUACAGCGGACUGAACC |
| 140 | JW13126_Guide1_3′ | GUUGUAACUGCUCUUGUUUUGAAGGGUAAACACAACUCCUAAAAUUCCCUUAGUCAGAG |
| 141 | JW13127_Guide1_3′ | UUCAAAAUAAGGGCAGUUACAACUCCUAAAAUUCCCUUAGUCAGAG |
| 142 | JW13128_Guide1_3′ | GUCUAAGACUAGGUAAGAAUUAGCGGUGUCCAUUGCUCCUAAAAUUCCCUUAGUCAGAG |
| 143 | JW13129_Guide1_3′ | GCUGGAGCAGCCCUCGAUUUGCAGGGUAAUCACAGCUCCUAAAAUUCCCUUAGUCAGAG |
| 144 | JW13130_Guide1 3′ | GUUGUAACUGCCCUUAUUUUGAAGGGUAUAAACAACUCCUAAAAUUCCCUUAGUCAGAG |
| 145 | JW13131_Guide1_3′ | GUUGUGUGUAACCUAAAAAAUGAGGGCAAUAACAACUCCUAAAAUUCCCUUAGUCAGAG |
| 146 | JW13132_Guide1_3′ | GCUGUAGAAGCCUCCGAUUUGUGAGGUGAUGACAGCUCCUAAAAUUCCCUUAGUCAGAG |
| 147 | JW13133_Guide1_3′ | GUUGUAACUGCCCUUAUUUUGAUGGGUAAAAACAACUCCUAAAAUUCCCUUAGUCAGAG |
| 148 | JW13134_Guide1_3′ | GCUGGAGCAGCCCUCGAUUUGCAGGGUAAUCACAGCUCCUAAAAUUCCCUUAGUCAGAG |
| 149 | JW13135_Guide1_3′ | GUUGUUCUCACCUUGCAAAUAAUAAGGCAUAUACAUCCUAAAAUUCCCUUAGUCAGAG |
| 150 | JW13136_Guide1_3′ | GGUGUACCUGCCAUGCAAAUAGAUGGCUUUCACACCUCCUAAAAUUCCCUUAGUCAGAG |
| 151 | JW13137_Guide1_3′ | GCUGUAAUCACCCCGCAAAACCAGGGUUGCUUCAGCUCCUAAAAUUCCCUUAGUCAGAG |
| 152 | JW13138_Guide1_3′ | GUUGUCUUUACUCCACAAACUAAGAGCAUUCACAACUCCUAAAAUUCCCUUAGUCAGAG |
| 153 | JW13139_Guide1_3′ | GGUGUUUUAAUCUUUCCAACUAAAGACUUUUACACCUCCUAAAAUUCCCUUAGUCAGAG |
| 154 | JW13140_Guide1_3′ | CCUUCUUUUUGAAAGGCACAAAUACCUCCUAAAAUUCCCUUAGUCAGAG |
| 155 | JW13141_Guide1_3′ | GUUGUUUUCACCUUGCAAAUAUAAGGCAUUUACAACUCCUAAAAUUCCCUUAGUCAGAG |
| 156 | JW13142_Guide1_3′ | GUUGUUUUUACCCUUCAGAAUAAGAGCAGUUCCUAAAAUUCCCUUAGUCAGAG |
| 157 | JW13143_Guide1_3′ | ACGUUGUCAUACCCCUCCUAACGAGGGGCUUCUACAACUCCUAAAAUUCCCUUAGUCAGAG |
| 158 | JW13144_Guide1_3′ | GUUGUGAAUGCCAUAUUUUUGAAAGGUAGAAACAACUCCUAAAAUUCCCUUAGUCAGAG |
| 159 | JW13145_Guide1_3′ | GUUGUAGCAACCUAUAUUUUGUUAGGAAAAGACAACUCCUAAAAUUCCCUUAGUCAGAG |
| 160 | JW13146_Guide1_3′ | GUUGUUGAAUGCUGCAUUUUGGGUAGCAAUUACAACUCCUAAAAUUCCCUUAGUCAGAG |
| 161 | JW13147_Guide1_3′ | GCUGUACCUACCCUGCAAAUCAGGAGCCUCUACAGCUCCUAAAAUUCCCUUAGUCAGAG |
| 162 | JW13148_Guide1_3′ | UAGUUUUAUUACCCCUACAAACAGGGUUAUAUUCUAACUCCUAAAAUUCCCUUAGUCAGAG |
| 163 | JW13149_Guide1_3′ | UGCUCUCAGUUUUGGAGGGUAAACACAACUCCUAAAAUUCCCUUAGUCAGAG |
| 164 | JW13126_Guide1_5′ | UCCUAAAAUUCCCUUAGUCAGAGGUUGUAACUGCUCUUGUUUUGAAGGGUAAACACAAC |
| 165 | JW13127_Guide1_5′ | UCCUAAAAUUCCCUUAGUCAGAGUUCAAAAUAAGGGCAGUUACAAC |
| 166 | JW13128_Guide1_5′ | UCCUAAAAUUCCCUUAGUCAGAGGUCUAAGACUAGGUAAGAAUUAGCGGUGUCCAUUGC |
| 167 | JW13129_Guide1_5′ | UCCUAAAAUUCCCUUAGUCAGAGGCUGGAGCAGCCCUCGAUUUGCAGGGUAAUCACAGC |
| 168 | JW13130_Guide1_5′ | UCCUAAAAUUCCCUUAGUCAGAGGUUGUAACUGCCCUUAUUUUGAAGGGUAUAAACAAC |
| 169 | JW13131_Guide1_5′ | UCCUAAAAUUCCCUUAGUCAGAGGUUGUGUGUAACCUAAAAAAUGAGGGCAAUAACAAC |
| 170 | JW13132_Guide1_5′ | UCCUAAAAUUCCCUUAGUCAGAGGCUGUAGAAGCCUCCGAUUUGUGAGGUGAUGACAGC |
| 171 | JW13133_Guide1_5′ | UCCUAAAAUUCCCUUAGUCAGAGGUUGUAACUGCCCUUAUUUUGAUGGGUAAAAACAAC |
| 172 | JW13134_Guide1_5′ | UCCUAAAAUUCCCUUAGUCAGAGGCUGGAGCAGCCCUCGAUUUGCAGGGUAAUCACAGC |
| 173 | JW13135_Guide1_5′ | UCCUAAAAUUCCCUUAGUCAGAGGUUGUUCUCACCUUGCAAAUAAUAAGGCAUAUACA |
| 174 | JW13136_Guide1_5′ | UCCUAAAAUUCCCUUAGUCAGAGGGUGUACCUGCCAUGCAAAUAGAUGGCUUUCACACC |
| 175 | JW13137_Guide1_5′ | UCCUAAAAUUCCCUUAGUCAGAGGCUGUAAUCACCCCGCAAAACCAGGGUUGCUUCAGC |
| 176 | JW13138_Guide1_5′ | UCCUAAAAUUCCCUUAGUCAGAGGUUGUCUUUACUCCACAAACUAAGAGCAUUCACAAC |
| 177 | JW13139_Guide1_5′ | UCCUAAAAUUCCCUUAGUCAGAGGGUGUUUUAAUCUUUCCAACUAAAGACUUUUACACC |
| 178 | JW13140_Guide1_5′ | UCCUAAAAUUCCCUUAGUCAGAGCCUUCUUUUUGAAAGGCACAAAUACC |
| 179 | JW13141_Guide1_5′ | UCCUAAAAUUCCCUUAGUCAGAGGUUGUUUUCACCUUGCAAAUAUAAGGCAUUUACAAC |
| 180 | JW13142_Guide1_5′ | UCCUAAAAUUCCCUUAGUCAGAGGUUGUUUUUACCCUUCAGAAUAAGAGCAGU |
| 181 | JW13143_Guide1_5′ | UCCUAAAAUUCCCUUAGUCAGAGACGUUGUCAUACCCCUCCUAACGAGGGGCUUCUACAAC |
| 182 | JW13144_Guide1_5′ | UCCUAAAAUUCCCUUAGUCAGAGGUUGUGAAUGCCAUAUUUUUGAAAGGUAGAAACAAC |
| 183 | JW13145_Guide1_5′ | UCCUAAAAUUCCCUUAGUCAGAGGUUGUAGCAACCUAUAUUUUGUUAGGAAAAGACAAC |
| 184 | JW13146_Guide1_5′ | UCCUAAAAUUCCCUUAGUCAGAGGUUGUUGAAUGCUGCAUUUUGGGUAGCAAUUACAAC |
| 185 | JW13147_Guide1_5′ | UCCUAAAAUUCCCUUAGUCAGAGGCUGUACCUACCCUGCAAAUCAGGAGCCUCUACAGC |
| 186 | JW13148_Guide1_5′ | UCCUAAAAUUCCCUUAGUCAGAGUAGUUUUAUUACCCCUACAAACAGGGUUAUAUUCUAAC |
| 187 | JW13149_Guide1_5′ | UCCUAAAAUUCCCUUAGUCAGAGUGCUCUCAGUUUUGGAGGGUAAACACAAC |
| 188 | JW13150_Guide1_3′ | GUCAUAGACCCCUUCAAUUUAUGAGGGGUUUUGUUCUCCUAAAAUUCCCUUAGUCAGAG |
| 189 | JW13153_Guide1_3′ | GUUGUGGAAGCCCUCAUUUUGAGAGGGUAUUACAACUCCUAAAAUUCCCUUAGUCAGAG |
| 190 | JW13154_Guide1_3′ | GUUGUGCUUACCCUUAAAACUAAGGGCAGCUACAACUCCUAAAAUUCCCUUAGUCAGAG |
| 191 | JW13155_Guide1_3′ | GUUGUAAGUGACCUCAUUUUGGAAGGUAAAAACAACUCCUAAAAUUCCCUUAGUCAGAG |
| 192 | JW13156_Guide1_3′ | GUUGUGUAUAUCUCCCAAAUCAGAGACAGCUACAACUCCUAAAAUUCCCUUAGUCAGAG |
| 193 | JW13157_Guide1_3′ | GUUGUUUAUACCUUACAAAAUAAAGGCUCUCACAACUCCUAAAAUUCCCUUAGUCAGAG |
| 194 | JW13158_Guide1_3′ | CCUUUGGAGUACUGUUAUUUAACAGGGUUCUAAAACUCCUAAAAUUCCCUUAGUCAGAG |
| 195 | JW13159_Guide1_3′ | GUUGUCGAAAGCCUUAUUUUGAAGGGCUAUUACAACUCCUAAAAUUCCCUUAGUCAGAG |
| 196 | JW13160_Guide1_3′ | AUGACUAUACCAGCAAUGGCUGGAUUAAAACUCCUAAAAUUCCCUUAGUCAGAG |
| 197 | JW13161_Guide1_3′ | GCUGUAGAGGCCCCCGUUUUAGGGGGUAGGUACAGCUCCUAAAAUUCCCUUAGUCAGAG |
| 198 | JW13162_Guide1_3′ | GCUGUUACUGCCCCACAAAUCGAGGCCUAUCACAGCUCCUAAAAUUCCCUUAGUCAGAG |
| 199 | JW13163_Guide1_3′ | GCUGUAGAGGCCCCCGAUUUUCCUAAAAUUCCCUUAGUCAGAG |
| 200 | JW13164_Guide1_3′ | GUUGUGCCUACCUCUCAAAUAUAGGGCUUUCACAAUCCUAAAAUUCCCUUAGUCAGAG |
| 201 | JW13165_Guide1_3′ | GUUGUAAAUACCCUACAAAUUCCUAAAAUUCCCUUAGUCAGAG |
| 202 | JW13166_Guide1_3′ | GAACUAUAGUAGUGUAAAUUUACACUACUCUAAAACUCCUAAAAUUCCCUUAGUCAGAG |
| 203 | JW13167_Guide1_3′ | GCUGUUAUAUCCUUACCUUUGUAAGGGAAGUACAGCUCCUAAAAUUCCCUUAGUCAGAG |
| 204 | JW13168_Guide1_3′ | GUUGUAGUUCCCUUUUAUUUAGGGAUGGUGUUCAGCUCCUAAAAUUCCCUUAGUCAGAG |
| 205 | JW13169_Guide1_3′ | GUUGUAAAAUCUCUCGUUUUGGAGAGGAUUAACAACUCCUAAAAUUCCCUUAGUCAGAG |
| 206 | JW13170_Guide1_3′ | GUUGUAGAAGCCUGUCGUUUGGAUGGGUAUUCCUAAAAUUCCCUUAGUCAGAG |
| 207 | JW13171_Guide1_3′ | GUUGUCAUACCUACCCAAACGAUAGGCUUCUACAACUUCCUAAAAUUCCCUUAGUCAGAG |
| 208 | JW13172_Guide1_3′ | CUUAUACAACACCCAUUUUCACAGUGGGUCUAUAACUCCUAAAAUUCCCUUAGUCAGAG |
| 209 | JW13173_Guide1_3′ | GUUGUCAUACCGCUCCGAAUGAACGGCUUCUACAACUCCUAAAAUUCCCUUAGUCAGAG |
| 210 | JW13174_Guide1_3′ | GUUGUCAUACCGCCCCGAAUGAGCGGCUUCUACAAUUCCUAAAAUUCCCUUAGUCAGAG |
| 211 | JW13175_Guide1_3′ | GCUGUCAUUACCCUCCAAAACGAGGGCUUCUACAGCUCCUAAAAUUCCCUUAGUCAGAG |
| 212 | JW13176_Guide1_3′ | GUUUCAGAACCCCGUAAUUCUACGGGGUUGUAGUUGUCCUAAAAUUCCCUUAGUCAGAG |
| 213 | JW13177_Guide1_3′ | GUUUUAGACCCCUGUGAUUCAGGGGUGUAGUGAAACUUCCUAAAAUUCCCUUAGUCAGAG |
| 214 | JW13178_Guide1_3′ | GUUUUAAGACUGUGCAAAUUCGCAUAGCUUUCAAUCUCCUAAAAUUCCCUUAGUCAGAG |
| 215 | JW13179_Guide1_3′ | GUUGUAGAAGCCUGUCGUUUGGAUGGGUAUAACAACUCCUAAAAUUCCCUUAGUCAGAG |
| 216 | JW13180_Guide1_3′ | GUUGUCAUACCCACUCAAAUUGUGGGCUUCUACAACUCCUAAAAUUCCCUUAGUCAGAG |
| 217 | JW13181_Guide1_3′ | GUUUCCAUACCCACUCAAAUGCGGGCUUCUGAAACUCCUAAAAUUCCCUUAGUCAGAG |
| 218 | JW13182_Guide1_3′ | GUUGUGUGUGCCUUUCAAAUUGAAGGCGUUCCCAACUCCUAAAAUUCCCUUAGUCAGAG |
| 219 | JW13183_Guide1_3′ | GCUGUACUUACCAUACAAAUUUAUGGCUUUUACAGCUCCUAAAAUUCCCUUAGUCAGAG |
| 220 | JW13184_Guide1_3′ | GUGCGAGACCAUCCCCAAAUGAAGGGGAACUACACCUCCUAAAAUUCCCUUAGUCAGAG |
| 221 | JW13185_Guide1_3′ | GGUGUAGUUCCCAUUUAGUUGGGGAUGUUCUCCCGCUCCUAAAAUUCCCUUAGUCAGAG |
| 222 | JW13186_Guide1_3′ | GGUGCAGUUCCCCUUCAUUUGGGGAUGGUGUUGAGCUCCUAAAAUUCCCUUAGUCAGAG |
| 223 | JW13187_Guide1_3′ | UGCUGUAACAGCCCUGAUUUUGCAGGGUAAAUACAGUCUCCUAAAAUUCCCUUAGUCAGAG |
| 224 | JW13188_Guide1_3′ | CAAAAUGGAGACUUCAUCAGCUCCUAAAAUUCCCUUAGUCAGAG |
| 225 | JW13189_Guide1_3′ | ACCUCUCAAAAUGAGGCCUUCAACAACUCCUAAAAUUCCCUUAGUCAGAG |
| 226 | JW13190_Guide1_3′ | GUUGUAGAAGCUUAUCGUUUGGAUAGGUAUGACAACUCCUAAAAUUCCCUUAGUCAGAG |
| 227 | JW13191_Guide1_3′ | AAGACUGGUAUAUGAACCAGGGAGACAACAUCCUAAAAUUCCCUUAGUCAGAG |
| 228 | JW13192_Guide1_3′ | GUUGUCAUGCCGAUCCUAACGACAGGCUUCUACAACUCCUAAAAUUCCCUUAGUCAGAG |
| 229 | JW13193_Guide1_3′ | GUUGUAAAGACCUGCACUUUAGUAGGAAGAAACAACUCCUAAAAUUCCCUUAGUCAGAG |
| 230 | JW13194_Guide1_3′ | GUUGUAGAAGCCGUUCAUUCGGAGCGGUAUGACAACUCCUAAAAUUCCCUUAGUCAGAG |
| 231 | JW13195_Guide1_3′ | GUACUACACCCAUUUUGCAUGGGUCUAAAACUCCUAAAAUUCCCUUAGUCAGAG |
| 232 | JW13196_Guide1_3′ | GUUGUCUUUUCCUAACAAAAUAUAGGUUGCUACAACUCCUAAAAUUCCCUUAGUCAGAG |
| 233 | JW13197_Guide1_3′ | GUUGUAGAAGCCGCUCAUUCGGGGCGGUAUGACAACUCCUAAAAUUCCCUUAGUCAGAG |
| 234 | JW13150_Guide1_5′ | UCCUAAAAUUCCCUUAGUCAGAGGUCAUAGACCCCUUCAAUUUAUGAGGGGUUUUGUUC |
| 235 | JW13153_Guide1_5′ | UCCUAAAAUUCCCUUAGUCAGAGGUUGUGGAAGCCCUCAUUUUGAGAGGGUAUUACAAC |
| 236 | JW13154_Guide1_5′ | UCCUAAAAUUCCCUUAGUCAGAGGUUGUGCUUACCCUUAAAACUAAGGGCAGCUACAAC |
| 237 | JW13155_Guide1_5′ | UCCUAAAAUUCCCUUAGUCAGAGGUUGUAAGUGACCUCAUUUUGGAAGGUAAAAACAAC |
| 238 | JW13156_Guide1_5′ | UCCUAAAAUUCCCUUAGUCAGAGGUUGUGUAUAUCUCCCAAAUCAGAGACAGCUACAAC |
| 239 | JW13157_Guide1_5′ | UCCUAAAAUUCCCUUAGUCAGAGGUUGUUUAUACCUUACAAAAUAAAGGCUCUCACAAC |
| 240 | JW13158_Guide1_5′ | UCCUAAAAUUCCCUUAGUCAGAGCCUUUGGAGUACUGUUAUUUAACAGGGUUCUAAAAC |
| 241 | JW13159_Guide1_5′ | UCCUAAAAUUCCCUUAGUCAGAGGUUGUCGAAAGCCUUAUUUUGAAGGGCUAUUACAAC |
| 242 | JW13160_Guide1_5′ | UCCUAAAAUUCCCUUAGUCAGAGAUGACUAUACCAGCAAUGGCUGGAUUAAAAC |
| 243 | JW13161_Guide1_5′ | UCCUAAAAUUCCCUUAGUCAGAGGCUGUAGAGGCCCCCGUUUUAGGGGGUAGGUACAGC |
| 244 | JW13162_Guide1_5′ | UCCUAAAAUUCCCUUAGUCAGAGGCUGUUACUGCCCCACAAAUCGAGGCCUAUCACAGC |
| 245 | JW13163_Guide1_5′ | UCCUAAAAUUCCCUUAGUCAGAGGCUGUAGAGGCCCCCGAUUU |
| 246 | JW13164_Guide1_5′ | UCCUAAAAUUCCCUUAGUCAGAGGUUGUGCCUACCUCUCAAAUAUAGGGCUUUCACAA |
| 247 | JW13165_Guide1_5′ | UCCUAAAAUUCCCUUAGUCAGAGGUUGUAAAUACCCUACAAAU |
| 248 | JW13166_Guide1_5′ | UCCUAAAAUUCCCUUAGUCAGAGGAACUAUAGUAGUGUAAAUUUACACUACUCUAAAAC |
| 249 | JW13167_Guide1_5′ | UCCUAAAAUUCCCUUAGUCAGAGGCUGUUAUAUCCUUACCUUUGUAAGGGAAGUACAGC |
| 250 | JW13168_Guide1_5′ | UCCUAAAAUUCCCUUAGUCAGAGGUUGUAGUUCCCUUUUAUUUAGGGAUGGUGUUCAGC |
| 251 | JW13169_Guide1_5′ | UCCUAAAAUUCCCUUAGUCAGAGGUUGUAAAAUCUCUCGUUUUGGAGAGGAUUAACAAC |
| 252 | JW13170_Guide1_5′ | UCCUAAAAUUCCCUUAGUCAGAGGUUGUAGAAGCCUGUCGUUUGGAUGGGUAU |
| 253 | JW13171_Guide1_5′ | UCCUAAAAUUCCCUUAGUCAGAGGUUGUCAUACCUACCCAAACGAUAGGCUUCUACAACU |
| 254 | JW13172_Guide1_5′ | UCCUAAAAUUCCCUUAGUCAGAGCUUAUACAACACCCAUUUUCACAGUGGGUCUAUAAC |
| 255 | JW13173_Guide1_5′ | UCCUAAAAUUCCCUUAGUCAGAGGUUGUCAUACCGCUCCGAAUGAACGGCUUCUACAAC |
| 256 | JW13174_Guide1_5′ | UCCUAAAAUUCCCUUAGUCAGAGGUUGUCAUACCGCCCCGAAUGAGCGGCUUCUACAAU |
| 257 | JW13175_Guide1_5′ | UCCUAAAAUUCCCUUAGUCAGAGGCUGUCAUUACCCUCCAAAACGAGGGCUUCUACAGC |
| 258 | JW13176_Guide1_5′ | UCCUAAAAUUCCCUUAGUCAGAGGUUUCAGAACCCCGUAAUUCUACGGGGUUGUAGUUG |
| 259 | JW13177_Guide1_5′ | UCCUAAAAUUCCCUUAGUCAGAGGUUUUAGACCCCUGUGAUUCAGGGGUGUAGUGAAACU |
| 260 | JW13178_Guide1_5′ | UCCUAAAAUUCCCUUAGUCAGAGGUUUUAAGACUGUGCAAAUUCGCAUAGCUUUCAAUC |
| 261 | JW13179_Guide1_5′ | UCCUAAAAUUCCCUUAGUCAGAGGUUGUAGAAGCCUGUCGUUUGGAUGGGUAUAACAAC |
| 262 | JW13180_Guide1_5′ | UCCUAAAAUUCCCUUAGUCAGAGGUUGUCAUACCCACUCAAAUUGUGGGCUUCUACAAC |
| 263 | JW13181_Guide1_5′ | UCCUAAAAUUCCCUUAGUCAGAGGUUUCCAUACCCACUCAAAUGCGGGCUUCUGAAAC |
| 264 | JW13182_Guide1_5′ | UCCUAAAAUUCCCUUAGUCAGAGGUUGUGUGUGCCUUUCAAAUUGAAGGCGUUCCCAAC |
| 265 | JW13183_Guide1_5′ | UCCUAAAAUUCCCUUAGUCAGAGGCUGUACUUACCAUACAAAUUUAUGGCUUUUACAGC |
| 266 | JW13184_Guide1_5′ | UCCUAAAAUUCCCUUAGUCAGAGGUGCGAGACCAUCCCCAAAUGAAGGGGAACUACACC |
| 267 | JW13185_Guide1_5′ | UCCUAAAAUUCCCUUAGUCAGAGGGUGUAGUUCCCAUUUAGUUGGGGAUGUUCUCCCGC |
| 268 | JW13186_Guide1_5′ | UCCUAAAAUUCCCUUAGUCAGAGGGUGCAGUUCCCCUUCAUUUGGGGAUGGUGUUGAGC |
| 269 | JW13187_Guide1_5′ | UCCUAAAAUUCCCUUAGUCAGAGUGCUGUAACAGCCCUGAUUUUGCAGGGUAAAUACAGUC |
| 270 | JW13188_Guide1_5′ | UCCUAAAAUUCCCUUAGUCAGAGCAAAAUGGAGACUUCAUCAGC |
| 271 | JW13189_Guide1_5′ | UCCUAAAAUUCCCUUAGUCAGAGACCUCUCAAAAUGAGGCCUUCAACAAC |
| 272 | JW13190_Guide1_5′ | UCCUAAAAUUCCCUUAGUCAGAGGUUGUAGAAGCUUAUCGUUUGGAUAGGUAUGACAAC |
| 273 | JW13191_Guide1_5′ | UCCUAAAAUUCCCUUAGUCAGAGAAGACUGGUAUAUGAACCAGGGAGACAACA |
| 274 | JW13192_Guide1_5′ | UCCUAAAAUUCCCUUAGUCAGAGGUUGUCAUGCCGAUCCUAACGACAGGCUUCUACAAC |
| 275 | JW13193_Guide1_5′ | UCCUAAAAUUCCCUUAGUCAGAGGUUGUAAAGACCUGCACUUUAGUAGGAAGAAACAAC |
| 276 | JW13194_Guide1_5′ | UCCUAAAAUUCCCUUAGUCAGAGGUUGUAGAAGCCGUUCAUUCGGAGCGGUAUGACAAC |
| 277 | JW13195_Guide1_5′ | UCCUAAAAUUCCCUUAGUCAGAGGUACUACACCCAUUUUGCAUGGGUCUAAAAC |
| 278 | JW13196_Guide1_5′ | UCCUAAAAUUCCCUUAGUCAGAGGUUGUCUUUUCCUAACAAAAUAUAGGUUGCUACAAC |
| 279 | JW13197_Guide1_5′ | UCCUAAAAUUCCCUUAGUCAGAGGUUGUAGAAGCCGCUCAUUCGGGGCGGUAUGACAAC |

TABLE C
Nucleic Acid Sequences
Table 3-Nucleic Acid Sequences

| SEQ | | |
|---|---|---|
| ID | | |
| NO: | Name | Sequence |
| 280 | JW13101 | ATGAATCAGTACATACACGCTGATAAAAAAGAAAATAAAAAACGCCCCAACAAAAGCAGCATTATTCGTATCA |
| | | TGGTATCGGATTTTGACGATGAATACATTCAGGAAATCAAGGTGCTGTACACCAAACAAGGTGGCGTCGATACG |
| | | TTCAAAATAAACAAAATGAGCTATGACAGCGCCAGTCAGAAAATTATTTTTGAAGAAGTAGCAACACAAAACA |
| | | TGTTATCGGTGGAAGATTCAAATCTGAATTTTAAACGTCCAATGGTTGAGTGCAAAAATGGCGATATCTACGTC |
| | | GTTAAACCGTCGGGGAAAGTAAACGCAAAAGGACAGGCAATTGAACCTCTGAGATCTTATAAGATACATGGGA |
| | | AATACCTGGATCTGACAGAGGCAATTGGGAAAGACAACGCTGAATTGAGTGGCAAAAAGCAGATCTATCTTCAT |
| | | GTTGAGGATCTTTTAGGTATGCACACCACTGCCGATTCCATTGATCGTCGTAGACTCGAATCAGAGACCCAGAG |
| | | AACCCTGTTATCAAAAGAAGTGATGGAAAACTATGCTCTGATTATGGGCCACGAGATAAAGCTCAATGAATCCG |
| | | ATGAAACCTATAAACTGGCCTGTAGTAAAGAAATCTACAAGGCCAATCGGTTCTTAGACTATCGCTCACGCCTG |
| | | CTCTATTACTATAGCTTTATTAATCATTTTCTGGCGGGACTGTCAAAAGGGGCGACTTATGAGTACGCGGGAAAA |
| | | TCTTTGGTAACGGAGATTCCGGACGGTGAGGTGTGGCAATTATGTGAATTAGAGGTGACGGCGTACCATGGGAT |
| | | TACATTAACAAAAAAACAAATGAGCTTGTTAACGAAAATTGTCTCGAAATAGACGCGATCTATGCCCAGATGG |
| | | CAAAAAACATGAGAAAAACGTTAAACGAGTTCGTCGAAAATTATAACGCGATGATAGAAAAGCAAAACGAGCT |
| | | TAATAAAAACAAACCGCAGATGAAAAAAGCGATTGTGCAGGAACCGATTAAGTTCGAAAACTTTACAGAAGAG |
| | | AAAATCAATCAGGACTTGCACAATATTGTGTATATCCTGTCCGATCTGCGTCACAAACTGATGCACTTTGAGTAC |
| | | CGTTATTTTGATCTTCTGATGACGGGTAAAAAAATGGGCGAAAAAAGTGAAGTGGAAGTAAGTGTCCCTGATCG |
| | | GAATAGTGAGTTACCGGCTTCAAAGAATCAACCATCTAAGGATAAGTTCCGGAAAGGAAAGAAACTTTCAGAG |
| | | CTCTTAAACCTTAATATTCTGAAAGAACTCGACACATTTGTAAAAGTCAAAGAATCGTATCAGACCACTTATCTT |
| | | GAGACAAATGACAAAATAGAAATCCTGGGTAAGTTAAAAACTGCCAAATCTATCTATCAGATCTATCATCAAAT |
| | | TTGTCAGCGCAAAAACGGTTTCAACAAATTCATCAATTCCTTCTTTATTGTGGATGGTGAAGAAAATACAGAGGT |
| | | TAAAGACTGCATAAACGAGGTTTTTCGCAAGGAAATTCACTATTTCGAAACGGAAATAGCCAAATCCAATAAAG |
| | | ACACACTGGATGACAAGTATAAGAATAAAAATCAATCCCAGAAAACTCGTGACCGTATGGAAGATCAGATAGA |
| | | GGAGTGCAAACGTTATCAGGACGATGAATCCAATATAGATACTTGGGTTGCTTACCATAAGGATATTCATTATA |
| | | GCAAGCGGTACAAGAAACTGTACAGTAAACATAAAACGCTTGTAGGCAATCTGAACAGCGCTGTTTCCAAGGGT |
| | | TTAGACGGTCAGGTTATTAAGAAAATCAATGACGACATTGCAATTATAAAGCGCGAAATGAATGAAATTACCAA |
| | | AGCCAATTCAAAATCTCGGTTGCGCTATAAGATGCAAATGGCCTATGGCTTTCTCTTTGTTGAGTATGGTCTCAA |
| | | AATTCCGAAATTTTTAAACGATTTTGATCTGAGCCATGAGCGCACAGCGTCAAAAATAAAAGGATATACCTCGC |
| | | CAGAAAAAGTGACCCAATATCTGACCAATGGTGAAGGAAATAAAGACAATTTTAATTTGGATGAACTGACGAA |
| | | GAACTTTAAGAAGCAGATGAAGTTCGAGTTCCTGAAACTGAACGAAGATAATAACTTGATCAAACTCTACATTT |
| | | TGATCTATCAGCTTTTGCCACGAGAATTAAAAGGTGACTTTCTGGGTTTTGTTAAAAGCAATTATTACGATCTTA |
| | | AGCACGTGGATTTTCAAACACGAGAAACCGAAGCAAAAGATCAATTTTTCCACAACATGCGCCTGTTTGAAAAA |
| | | AACGTGAAAGCATTTGACTTGATCCAATATTCAATAGGGGATGAAATGTCTCAATTGGGCAATGAGACCTTTAA |
| | | TTTTTCACAGGCGCTGTCAAAAATAGTATCCGACGATACCATCCTTAATAGTGCTACCGAGATTCCCAACATCAA |
| | | TTGTCTGGTTTATGGGAGCTTATTAAAATACTACGAGAATGCTTTTCGTCTGTCTAGTGAAATCGAAATTCGCGC |
| | | CTTAATAAAAATTGCACGAAAAGAGAAAGAGGTGGTTGATCATTCCAATAGCTACTCGATTAACAAGGCACATA |
| | | GCAAAATTGAAAAAGAATTAAAAGAGCGTGATAGAGATAAGGAAGTCTCATTCTTTTGCATCCTCGAGTACGCC |
| | | CATAAAAATTCTCTTAATCAAAAAGGCGACTATACTGATTCTGAGATCTATGATAAAGCTTCCAACTTACGAAAT |
| | | AAGATTGCCCATTGCGATTATAGAAACCTGTTCATTACAAATATTATTTGTGAAGCGGAAAACATTAACGTGAA |
| | | GGTAAAATATCTGATTGACGTAAGCAACACAATCGGCCTTAACACTGTCGATCTTGGCAATGATATGGTGAACG |
| | | ATTACTTGATGTCTTATGATAAACAGATGACGTATCTCGTTAAAACCTCTGAAGAGCTTCTGAAAGAAAGCCGTT |
| | | TGGATAAAAGCAAAGAAAAAAAAGAACGCCGCGACAATCTTAAAAATGAAACGAGAAGTCATTCAGAAATCTA |
| | | CATGGAATATGAATGGATTAGTGATTACCTCGTGAAGTTGAAAGACAATCACGAGATCTTATTGAAAAAAAATA |
| | | AGACTGAGGATCTGAAACTGAATCGAGCGTATGAACTGATAAAAAACTATAATGTCGCTCTGAATAATAAGTCG |
| | | AAGATTAAGATAAGTGAGCTGACGGCAGACCATATCAATAACAATTGGGTGAACATCTGGGGAGTACTGAACC |
| | | ATGAACTGCAGGAAATTAACGGCCTTTATTTGTATAAGGTCACTCCTAAAATCAAAAAAGGGATCTACCTTGTTT |
| | | TAACCGATAAAAAGAATTACTGCCTGAATATTAACTTCTATACGCTTAAGAAAGTCCCTAGTAAAGATGATTCT |
| | | GAAATGACTGAAGAGCGTTATCTGCGTGATATTAGTGAAAAGTATTATTTTACCGTTGGTGAAGATAGTATGAA |
| | | AGCATTAAAAGATCGGTTGCAGACTATCAATGATAAGTGCATTGTTAACTATGTCAACAAAATTGACTGTAAGA |
| | | ATGAAAATCTCAAAGGAAAGTCGGAATTCAAAGTAATCGACGTTTATAATTCTTGGGATAAAAAATATCTGAGC |
| | | ATTTCAAATGAAGAGTCGCAGCATTGGTCTGTTGAGACAAAACGGGATAAGAAATACAAAGAAAACCTGATAT |
| | | TAAACCTGATGGAGAAGTCCTCTTTTAAGCTTAATCTGCATCAGCTGTAA |
| 281 | JW13102 | ATGGCGCATAATCCGACATATTTGTATGCCGCGTATTTGAATATGGCACGTCATAATGCCTATCTTACCCTGTCC |
| | | TACATCAGCGTTGCTATTGGCGGAAAAGAAGGCGCAGAGGATAAACTGCTCAATATGGAAGCTCTGAATATTCT |
| | | CAAAAAGCCAAAAGCAGAACCTGAAAAATTAAAGAAAACAGAAGAACTGTTGACCAAACATTTCCGTTTCCTT |
| | | CTCCCGATGACGGATAATGATAAAAGTGCCGGTTATCATGAAATTTTAACCACTGCATTCAAATTGCTCAATTCT |
| | | CTGCGGAACGAATATACGCACTATCAGCATGAAGCAAGCGATTTTGATGAACAGTTCATGAAAAATATGAAAA |
| | | ACTGCTTTGATGGGGCAAAACGGACGGTTAAGGAACGTTTCAATCTTGAAGACAACGATTTGAAGCACCTGGAC |
| | | CGGTTTAGACAAAAAGCGAATGATGGTAAAAAAGGCAAACGTGAATATGAGGAAAATCCAACTTTTCACTATA |
| | | AGTTTGATGATGAGAATGGCAGACTGACCGAAAAAGGCTTGGCGTTTTTTATTTGTCTGTTTCTCGAAAAGAAGT |
| | | ACGCTACACTCTTCCTTACTCAACTGTCCGGTTTCAAAAAAGGCGATACCAAAGGCACCAAAGCGACCAAAGAA |
| | | GTTTACTCGATCTACCGGATACAGCTGCCCAAATTAAGAATCGACAGCAAAAAACCGGAAATGGCTCTTGGTAT |
| | | TGATATGTTGAACGAGCTGAAAAAATGTCCCGCCGAGCTGTACGATGTATTAAGTACGGAAGACCAGAAACGCT |
| | | TTCGCATTATTCCCGATGAAGAACCGGACACGATGGACGATACGGAAGACGGCGAAATTCTGCTGAAACGACA |
| | | CAAAAACCGTTTTCCATACATGGCATTGAGATACATTGACCAAAACGAGCTTTTTCCAAATATTCGTTTTCAGGT |
| | | AGCTCTGGGAACTTATCGCCATCATTTTTACAACAAACTGGGGGTTGATAATATCCAGCGGGTGCGCATCCTGCA |
| | | AAAACAACTGAAAGGTTTCGGACGTCTTGACGAGATAGAGGAAAAGCGAAAGACCGTATGGGCAGACAAAATT |
| | | CGCCCTTTTGAAAAAATTGAGAAAGACTCTGCCGAACAAGAGCCTTATATCACAGACAGTTACGCCAAATATAT |
| | | TATTTCAAACAACAAAATCGGTCTGAAATGGTTCGACAGACAAAATGATTATTATCTTCCCGAGTTAAACGAAA |
| | | AAGGGGCGAAAAATGAAGCGCCCACATGTTGGTTATCCATCTATGAACTTCCGGCGTTACTGTTTCACAGCATC |
| | | CTTTGCAATCATAGTTCTGACACCCAGAATATTATACGTGATTATGTATCGAAGGGATACCGAAAACTGTTTAAA |
| | | GAGGTAGCATCCGGTGCGCTGCAGCCCGCCTCAAAAGAAAAAATCGTCAACCAACTTAAAACAGCCTATAATCT |
| | | TGATTTTACCCGCATACCGAAAGAATTGCAGGATTATCTCACCGGAAAGCCGGTTAAAATGGATGACCAGCTGA |
| | | ATAAACTGTGTTCGGAACGTATTGCTCAGATGGTCAGCGATTCACAGAAGCGACTTGAGCGCATAGATAACGAT |
| | | CTGAAAACTATCAAGGATAGAAAGAGCAACAAGGTCGGGAAGAAACGATTTGTAGAGATTAAAAGTGGTGTCT |
| | | TAGCCGATTTTCTGGCCGAGGATATGCTGGCATTTCAGTCCAGTTCGGACAACGGCAAAGATAAGTTGACGGGC |
| | | ATGAACTATCAGATATTACAAGCTGCACTTGCATATTTCGGTCAGTACAAAGACCAGATGACAGAAATCTTTGA |
| | | GAAGTGCAAGTTGATAAACTCACCAATCGAACATCCGTTTCTGAAGAATGTGATGGCAAAAAATGCTACCAACA |
| | | TTGTGGATTTCTATATCGTTTACTTAAAGGCGAAGGAAATATATCTGGATAAGTGTCTGCGGGAGAAACAATAT |
| | | AAGAACGATTATTTTTTACATGTTGACCGCCAAAAATGGACGGAGCGCAATACTGATTTTTACAAAGTGTTGGC |
| | | AAAGAGCTATGCGGAGAAATTGCCTGTTGAATTGCCGCGCGGTCTGTTTAACGATGCCATTAAAAAGCTGTTGA |
| | | CGAAAAAGCACGGTGATAATCCGGTGATTCGCGAAGCTCTGTCAAAAGAGCGGTGCAATACAACTTTCCTGATT |
| | | CAGACTTATTTCAAAGCTATCTGTGAAGACACCACACAGGAATATTATACATTCAACCGCAGTTATAAGATTTTC |
| | | AATTTGCTCAATGATAACTACGTCGGAAATAAACTTCAGCCTGCCTATTATGCTGTTAATGAATTTGAGAAAAGA |
| | | GTCAAAAACATAGATGCGGAAATAGAGAAATTCGACTCTCAGCAACACGATAAACTTCATCGTCTGTTACATCA |
| | | TTTCAAAGAAAATGAAAAAATACTCCGTTTATACAAAGTGCAGGATATCTTACTGTTTTTGATGGCAAAACGCA |
| | | TACTCATCACGGAGATGGGTGAGAATAATATTGGGAAATACCAGTTAAAACAGATTATGCCGGATAGCCCAACG |
| | | GATATTTTATCTGCTCAAACATCATTTTCAATCACTCTGACCAAAAACGGATGCCAGAAGATCATCAAACAGGA |
| | | GAAACTGAAACTGAAAAATTTTGGCGATTTCCAGCGTTTTGTGCGTGACCGTCGTATCGAGACTTTATTTCCATA |
| | | TATGAAAGCGGATAGTATTGACCGGCAGATACTGGAAGCCGAGCTGGATGCGTACGATGATAAGCGCGTGCAT |
| | | ATTTTTGAACTCATACATCAGTTTGAGGAGTCTGTGTTGACAAAGAATCCATCCATTTTATCAGGGAAAACCTAC |
| | | ATCAATTTCGCCGGTATTTTAAAAGCATCTCCTGAGATTCAGACAGAAAAACGTCAGCAAATGCAAATTATCCG |
| | | CAATGCCTTCTGCCACAATACTTATCCTCAAAAGATTGAAAAGAACATTGAAGACATTGAAAAGCCGGAAGGGA |
| | | AAACCGATGTTCCTTTTTCTTTATGTGAAAAGAAAGAAATACCGGAAATTGCTGAGTTTCTGACGGAATCGCTTG |
| | | AAGACTTGATCATTATAAACGAACACTAA |
| 282 | JW13103 | ATGGATACTCCTAATTTTTCTGAGCGTATCCCGGTTTCTTTACAAAGCCATCCTTATTATTTTGCGCACTATCTTA |
| | | ACATGGCCCGCCACAACGCCTATGTGATTCTGGAGTATGTGAATAGAGAGTTAATAAAGCCAGGTAAGAACCTG |
| | | GACGAAGACAACCTGATCCAGAGCACGGTGCTGAAAGACGGATATTTTGATCGTAAACCTGACGAGCTCTCACA |
| | | CCGGAATCGCCTGCTGGTCCAACATTTTCCTTTTTTACGTGAGGCAGAAAATGAAGGTGCACGCACGTGCAATCC |
| | | GGTTAGCTATAAACTGAAAACCGCTTTAGCAGCACTGAACCAGTGGCGTAATAATGCATCGCATTATCCGCTCA |
| | | ACCAGAATCACGAGAAAGACTTTGACCTGCAGCCGTTTTTTTCCTTTGCCATTGAGGCCTGCAAAAAAAGAATG |
| | | CGGGAAGTTTTTCAGCCAGATGACTTTTATCTTTTGGAGACCAACGAGAAACAGTTCTACACGTTACATAATGAA |
| | | AACGGTTTCACAGAAAAAGGGCTGTACTGCTTTATTTGTTTCTTCCTTGAGAAAAAGTATGCGTTTCAATTCCTC |
| | | GCCGGCATTAAGGGGTTTAAAAATACAACAGATAATAAGTTCCGCGCTACCTTAGAGACGTTTACCGAGCATTG |
| | | TTGTCGATTACCAAAACCCAAACTTGATTCTTCAGATATTAAACTTGACATGCTGGGCGAACTGTCTCGTTGTCC |
| | | CGCCCCTCTGTTTGATCTGCTGGATATCGAAGAGCGGAAGAAGTTCATCCGCGAACCCGAAGAAGTAAAACCGG |
| | | ACGAATCCGGTGATAGAGAAGAAGTGCAGCAGGTGTTAATGAAACGTTACGATGACCGCTTCCCGTATTTTGCG |
| | | TTACGATATTTCGAGGAAAAAAATCTGCTCAAAGGGATCTCATTCCATATTCACATAGGCAGATGGATAAAAAG |
| | | TGAACATACGAAAAAAATTATGGGCGCCGAACGTGATCGTCGTTTGCTGAAAGATATTCGTACATTTGGCGAAC |
| | | TGAAAGAATTTTCTCCTGAACACGCTCCGGATTATTGGCTGCGCGACGGCATTACTCCTGATGATGTGGATCAAT |
| | | TTTCAACGCCGCAGTATCGTATTGTTGGAAATCGAATTGGAATCAAACTTAATTACAACGGCCATAATAGATGG |
| | | TCGGTTCCGGATAAAGAGATTAACGTAAAACCTGATGCTATCATAAGTACGTACGAATTTCTGAACTTGTTTCTT |
| | | TACGAGCATCTTTATCAGAAAAAACTGACCGGCTTAAGTCCGGCCGAGTTCATTCAGGATTACCTTGATCGCTTT |
| | | AATAATTTCCTCTCTGAATTCAAAGCCGGTCACATACGTCCAGTTGGAGATTTTTCGTTAGAGAAACGTCGAGGG |
| | | CAAGGGGACGAACCTGATCTTACTGCGCGTCGCAAAAGTTTGCAGAAAGAATTAGATCGATTTGTCTTAAAAGG |
| | | GAAAGACCTTCCTGACAAGATCCGCGAATATTTGTTAGGCTATAAACAGAAGAGTGAGAAGAAACAGGCGAAG |
| | | TGGATACTCGGTGGTATGATTAAAGAAACCGTCTATTGGCGTAATAAAGCAGAACAGTCCCCGGAAAAAATGCG |
| | | AAGCGGAGATATGGCCCAACAGCTGGCTCGGGATATCATTTTTTTAACGCCGCCACACACAGTTAAGGAACACA |
| | | AGCAGAAATTGAACAGCTTGGAGTATGATGTACTGCAGTATGCACTGGCCTATTTCAGCTCAAATCGCGAGAAA |
| | | CTTTATTCTTTCTTTAAAGAACATCAACTCACTGTCAAAGGGGACCGCGCACATCCATTTCTTTATAAGATTCGG |
| | | CTGGACGAGTGTCAAGGTATATTAGACTTTTTCATCGTGTATATGCAGCAGAAAGAAAAATGGCTGGGGTGGCT |
| | | GGACCGCAACTTGAAGTCACCACGTTTGAACGAAGAGGAGTTCTTTAACACTTACTCATATTTTATTAAAACAG |
| | | ATACTAAGCGGGCAATTGAGATGGATTATGAAAGTTGCCCAAATTATCTTCCGCGAGGTATTTTTAATGAACCTA |
| | | TAGCAAAAGCTGTCCAAAAAGCTGGTGTGAAGATTAAAGACGAAGATAATGCGAGTTATGCGTTATCCGTATAT |
| | | AGCAACGGCAAGACTCAACCCTTCTACAATAAGGAACGGTACTATAATAAAGGTATATTTCGCATGGAAGAACT |
| | | GCCGGAAAAGCTGCAGCCCAAGGAATTGTTAGGTAAAATACAGTGGACAATCAAGAGTAGCGGTAAAGATACT |
| | | GAAGAATTTCGGTCGTTACAGAACCTGAAAAACCGTATTCTGAACACCGAGAAAGAAATTCGTTATGTTCAATC |
| | | CACAGATAGAGCGCTGTGGATTATGGTTGCTGATCTTTTTCCCGAAACCTTCGAGCTGAGACCAGATGATCTGGA |
| | | GTGTATAGGACATGATCTTTCTGATGATCTTTTAAGCCGCCCCTATCAGATGAAAGAGAAAGTCTACAATTACAC |
| | | AATTACAGACTATTTGCCGATAAAGCGGTACGGAGAATTTCGCCGTTTCTTAAAAGATAGACGTCTCGAGAATC |
| | | TCTTAACCTACTTTGAAGAAGGCGTACCGCTGCATCGGGAAGCTCTGGTAGCGGAGCTCGAGGCGTACGACCTG |
| | | CAGAGAAAAAATTTGTTGGAGATCATCTATCGGTTTGAGAAGTTAGTATTCGACCGCCATCGGCATGAACTGAC |
| | | TTTCTCAGGTGAGGGCGAAAATCAATACGTGAATCACTGGGATTACTTGGATTTTGTTGCACGTAAGTACGGACT |
| | | GTCGGCAGAAGTGAAAGAACTGAACTCCGAACGTTTTACGGAACTCCGCAACAAAATGCTGCATAATCAGATTC |
| | | CATACCAGTTATGGATCAAAGAAGCCATCGCTGCGAGAGAAGAAAATACCGTCTGCGGTAGAATTATGGGAAT |
| | | GATCGGCGAAATCTATGAACGCATGACCACCGAAATCGAAAAACAAATGCAAGTTTAA |
| 283 | JW13104 | ATGGAAAATCAGACACAAAAAGGAAAAGGTATCTATTACTACTATACCAAAAATGAAGACAAACACTATTTTG |
| | | GCTCCTTTCTGAACCTGGCGAATAATAATATCGAGCAAATCATTGAAGAGTTCCGGATTCGTCTTAGTCTGAAAG |
| | | ATGAAAAAAACATCAAGGAAATTATCAACAACTACTTCACTGATAAAAAGTCTTACACGGACTGGGAACGTGGT |
| | | ATAAACATATTGAAAGAGTATCTTCCGGTTATTGATTATCTCGACTTGGCTATTACCGATAAAGAGTTCGAGAAA |
| | | ATTGATCTTAAACAAAAAGAGACCGCAAAACGCAAATACTTTCGGACAAATTTCTCACTGCTGATCGATACTAT |
| | | CATTGATCTTAGAAATTTTTACACGCACTATTTTCACAAACCTATCTCAATCAATCCCGATGTAGCTAAGTTTTTA |
| | | GACAAAAACCTTTTAAACGTGTGTCTCGACATCAAAAAACAAAAAATGAAAACCGATAAAACCAAACAGGCTT |
| | | TGAAAGATGGTCTGGATAAAGAGCTCAAAAAGCTGATTGAATTAAAAAAGGCAGAGCTGAAAGAGAAGAAGAT |
| | | TAAGACGTGGAATATTACGGAAAACGTTGAAGGAGCTGTTTACAACGATGCGTTCAATCACATGGTTTATAAGA |
| | | ATAACGCGGGTGTTACAATACTGAAAGACTATCACAAAAGCATATTGCCCGATGACAAAATTGACAGTGAGTTA |
| | | AAACTGAACTTTTCAATCTCCGGACTGGTCTTTTTACTTTCTATGTTCCTGTCAAAGAAAGAAATTGAGCAGTTC |
| | | AAATCTAATCTCGAAGGCTTTAAGGGAAAGGTCATAGGCGAAAATGGGGAGTATGAAATTAGCAAATTCAACA |
| | | ATAGTCTTAAGTATATGGCGACACATTGGATTTTTTCATATCTGACTTTCAAAGGGCTCAAACAGCGGGTAAAAA |
| | | ACACGTTTGACAAAGAAACCTTGTTAATGCAGATGATTGATGAACTGAACAAAGTCCCTCACGAAGTTTATCAA |
| | | ACGCTGAGTAAAGAACAGCAAAATGAGTTTTTAGAAGACATTAACGAATATGTGCAGGATAATGAGGAAAACA |
| | | AAAAGTCAATGGAGAATTCGATTGTCGTGCATCCGGTTATCAGAAAACGCTATGATGATAAGTTCAATTATTTTG |
| | | CGATTCGTTTCCTGGACGAGTTTGCAAATTTTCCTACTTTAAAGTTTTTTGTTACAGCAGGTAATTTTGTACACGA |
| | | TAAAAGAGAAAAACAGATTCAGGGAAGCATGCTTACTTCTGATAGAATGATAAAGGAAAAAATCAATGTGTTT |
| | | GGCAAACTGACTGAAATTGCAAAGTACAAAAGCGATTATTTTAGCAATGAAAATACACTTGAAACTTCTGAATG |
| | | GGAGTTATTTCCTAACCCGAGCTATCTCCTCATACAAAACAATATTCCGGTGCATATTGATCTTATTCATAATAC |
| | | CGAAGAGGCAAAACAGTGCCAGATTGCGATTGACCGAATAAAATGTACGACGAATCCGGCTAAGAAGCGCAAT |
| | | ACTCGCAAATCCAAAGAGGAGATAATAAAGATTATCTACCAGAAGAACAAGAATATCAAATATGGCGACCCGA |
| | | CGGCACTTCTGAGTAGTAATGAGTTGCCAGCATTAATCTACGAGTTACTGGTCAATAAAAAATCTGGTAAAGAG |
| | | CTGGAGAACATTATAGTAGAAAAAATCGTCAATCAATATAAGACGATTGCCGGGTTTGAAAAAGGGCAAAATC |
| | | TGTCAAATAGTTTAATCACAAAAAAACTGAAAAAGAGCGAACCGAATGAGGATAAAATTAACGCCGAAAAAAT |
| | | TATTCTGGCCATTAACCGAGAGCTGGAAATCACCGAAAACAAACTCAATATCATAAAAAATAATCGGGCAGAAT |
| | | TTCGCACAGGTGCGAAAAGAAAACATATCTTTTATTCTAAAGAGTTAGGGCAGGAAGCGACTTGGATAGCATAC |
| | | GATCTTAAACGTTTCATGCCCGAGGCTTCCCGTAAAGAATGGAAAGGTTTTCATCATAGCGAACTCCAGAAATT |
| | | CTTAGCTTTCTATGATCGCAATAAAAATGATGCGAAAGCTTTGCTGAACATGTTCTGGAATTTCGATAACGACCA |
| | | ATTAATTGGCAATGATCTTAATTCAGCCTTCCGTGAGTTCCACTTCGATAAGTTTTATGAAAAGTATCTGATTAA |
| | | GCGGGACGAAATACTTGAGGGCTTCAAGAGTTTCATCTCGAATTTTAAAGATGAACCTAAGCTGCTTAAAAAGG |
| | | GCATTAAAGACATCTACCGTGTGTTTGATAAACGATACTACATAATTAAAAGTACAAACGCCCAAAAAGAGCAA |
| | | TTGCTGTCCAAACCAATCTGCCTGCCACGTGGTATATTTGATAACAAACCAACATATATCGAAGGTGTTAAAGTT |
| | | GAGAGCAATTCGGCTCTGTTTGCCGATTGGTATCAATATACATATTCCGATAAACATGAATTTCAGTCCTTTTAC |
| | | GACATGCCCCGGGATTATAAGGAACAGTTTGAAAAGTTTGAACTGAATAACATCAAAAGCATTCAGAATAAGA |
| | | AGAATCTGAATAAAAGCGATAAGTTTATCTATTTCCGATACAAACAGGATTTGAAGATTAAACAGATAAAGTCG |
| | | CAGGACTTGTTCATCAAACTCATGGTGGACGAATTGTTTAACGTCGTGTTCAAAAATAACATAGAACTTAACCTG |
| | | AAGAAGCTGTATCAAACCTCTGACGAACGCTTTAAAAACCAGTTAATAGCCGATGTACAAAAAAATCGTGAAA |
| | | AAGGCGATACATCGGATAATAAAATGAACGAAAATTTTATCTGGAACATGACCATTCCGCTTTCATTATGTAAT |
| | | GGTCAGATTGAAGAACCGAAAGTAAAACTTAAAGACATTGGTAAGTTTCGTAAACTGGAAACCGACGATAAGG |
| | | TCATTCAGTTGCTTGAGTATGATAAAAGTAAAGTGTGGAAAAAACTCGAGATCGAAGACGAATTAGAAAACAT |
| | | GCCAAATTCATACGAACGTATACGCCGTGAAAAATTGCTGAAAGGAATCCAGGAATTTGAACATTTTCTGCTCG |
| | | AAAAAGAAAAATTTGATGGCATAAACCATCCTAAGCATTTTGAACAGGACCTGAATCCAAACTTCAAAACCTAT |
| | | GTGATTAATGGAGTGTTACGCAAAAACTCGAAGTTAAACTATACCGAAATTGATAAACTGCTCGATCTGGAACA |
| | | TATTTCAATAAAGGATATTGAAACCTCTGCCAAAGAGATTCATTTGGCGTATTTTCTTATTCATGTACGCAACAA |
| | | ATTTGGGCATAACCAGCTGCCGAAACTGGAAGCCTTTGAGTTGATGAAGAAATATTACAAAAAAAATAATGAG |
| | | GAGACTTATGCCGAGTACTTTCACAAAGTTAGTAGCCAGATCGTTAATGAATTCAAAAATTCCCTGGAAAAGCA |
| | | TTCTTAA |
| 284 | JW13105 | ATGAAAATTAAAAACGAAAATACCGATAAGAAAACTGAACTCTATTCGATCGATAAGTACAAAGGCCGCGATA |
| | | AGTGGTGTTTTGCTATCGTGCTTAATAAAGCACAAACAAATCTTACGGAAAATCCTGATCTGTTCGAGCAAACC |
| | | ATAACGAAATATGACCGGATCCGGAAAGAAGGTTGGTTTGACGAGGAAACAAAGAAATTAATCTATATCCAAG |
| | | AGAATGAGCACAAAATCAAAGGAGAAATAAAAACTCTGGCCCGTGAGGTATTAAAAAATCTGCGCAATTACTT |
| | | TTCACATCACTTTTACAAACAGGACTGCCTGATTTTTCCAAAAGATAACATTGTGCGTATTATTATGGGGCGCGC |
| | | ATACGAACGAAGTGAATATGAAATCAAGAAAAATCTGAAGGAAGATATTTCGATCGAGTTACCCGCTTTATTCG |
| | | AGCCAGAAGGCAAAATTACCACGGCGGGTATAGTATTTTTTACTTCATTTTTTGTCGAACGCCGATTTTTACACC |
| | | GTTTGATGGGTAGTGTTCAGGGGTTTACCAAAACCGAAGGAGAGTACAAAATAACACGTGATGTTTTTGCTAAG |
| | | TATTGTCTGCGTGACAGCTATTCAGTTAAAGCGCAGGATAACGACGCAGTTATGTTTCGCGATATTATTGGTTAT |
| | | TTGTCACGAGTTCCAACGGAGTCCTTCCAACATATTAAAAATCCGAAGAAACAGAATGAGAGTCAGTTAAGCGA |
| | | AAGAAAGACAGACAAGTTTATCTCTTTCGCCCTGAAATATCTGAAAGACTATGGCTTTGAGGACTTGAAAGGTC |
| | | ACTACACGGCTTTCTTTGCGCGTAGTGAGATTAAGAAGGAAAAAGAGGATATCGAAATTAAAGATGACAAAAA |
| | | ACACAAGCCTCACCGTATGAAATCCAAAATTGAGATTCATTTCGATAAAACAAAAGAAGATCGCTTCTACATTG |
| | | AGCGCAATAACGTCATTTTGAAGATTCAAAGAAAAGGCGGTCGTGCCAATATATTAAGAATGGGTATCTATGAA |
| | | CTTAAGTACCTGGTGCTCCTGTGTTTGTCCGGGAAAGCACGCGAGGCGATCAATCGCATCGACGATTATCTGAA |
| | | CGATCTTCGGAACAAAATTCCTCATATTGAAAATATGAACAAAGAGGGTATTGGCGAACAAATACGTTCCCTGC |
| | | CGGGATTTGTAAGAAGCCAACTGGGCTTTGTTCAGATTGATGATGAGAAAAAAAAGGAAAACCGTCTGGACTAT |
| | | GTTGAAAAAAAATGGGAAAAAAAGAGAGCCGAATCAAAGGAGCTGAAGTTGAATCGAAAAGGGCGGGACATA |
| | | CTCCGGTATATTAATGAACGTTGTAAAAAGCCGCTGACAATCGATCGTTATAATCGCATTCTGGAATTGCTGGTC |
| | | GAGAAAAATATAGAGGGATTTTATCATGAACTCGAAGAACTGAGAAAAACCGGTCGTATAGAGAAAAATATTA |
| | | CTCAGGCACTTGTCGGAGAAAAAAACATTAATGCATTACATATTAAAATTTGCAAACTGGTGCAGGATGAACTG |
| | | AAAAGCTTAGAAAAAGAAGACCTCAAGAAATATATCGGCTTGACTCCCAAAGAAGAAAAAGTCGTGTCGTTTG |
| | | AAGAAAAACTCGGTCGCATCCTGGATAAGCCGGTTATCTATAAGGGATTTCTTCGCTACCAGTTCTTCAAAAATG |
| | | ACAAAAAGTCCTTCGCGCGCCTGGTTGAGGAGATAATCAAAGAAAAAACCGGCGGTTTAGATGTACCCATTGAA |
| | | ACAGAGTATTATAGCATTTCAACCCTTGGCAGATTTGATAAAGCTAACAAAACGTTATATGAAACGTTAGCGAT |
| | | GGACCGACTTTGCATGATGATGGCCCGTCGCTATTTTCTGAGTCTGAATAAAATACTCGCAAAACGTGCCCAGA |
| | | ATATCGAATGGAAGAAAGAGAGTGGTAAAGAATTCATTGTGTTCAAGTTTAATATGCCTCAGGATACAGGAAAA |
| | | AGTATTTCGATCCGGTTCTCTCCAAAAGATTATACTAAACTTTATGTGAAGAATGATTCTGAATTCCTGGCCCGC |
| | | CTGTGCCAGTATTTTTTTCCGAATGAAAAAGCGATTGATTACCATAAGTTATACTCTCATGGCATAAACAAATAT |
| | | ACCAACTTCCAGAAGGAAGGGATCGAGGCTATACTTGAGCTCGAAGAAAAAATAATCAAAAAACGGAAAATCA |
| | | ACTCTCCGGAGAACTACTTATCATTTGAAGAAATACTGAACCAAAGCATCTACAACGATGAAGAAAAGAATACT |
| | | TTGATTCAGATTCGGCATTCTCTTTTGCATTATCAGATACTTTTTAGCAAAAACGATCTGACCAAATTCTACAAC |
| | | GTAATGAAGCGTGAGGGGATTGAAAAAATTTGGTCTTTAGTGATTTGA |
| 285 | JW13106 | ATGATCAAAAAACCCGCCAATCGGTTTGCCTTACCTAAAGTGATTATCTCTGAAGTGGATAGTGAGAACATTCT |
| | | GGAATTCAAAGTGAAATATGAAAAACTGGCACGGCTTGATCGCTTTGAAGTTGAAGCGATGCATTATGATGAAA |
| | | AGAATGAGATTATTTTTGATGAGGTCAAAGTGAACGATGGACTTATCGAAATTGTTTACAAAGAGAACAATAAA |
| | | AAGCTCGTTGTGGAAATTGAAGGCAAAGCATACGAAATTTCAGGCCAAAAAATAGGCGGAAAACAGCGTCTGC |
| | | TTGAGAACCGGGTAAGTAAAACCAAAGTGCAGCTGGAGCTTATGAATCATATAGAAGATGGAGAAGGTAACAA |
| | | ACGCGTCAGCCGTACCGAGCGCGAATTAATTGTTCTGGGTGACATTAAACTCTATTCTCAAATCGTCGGGCGAG |
| | | AAGTTAAAACGACTAAAGAAATCTATCTGATCAAACGCTTTCTGGAGTACCGCTCAGATTTGTTATTTTACTATG |
| | | GGTTCGTAGACAATTTTTTTAAAGTCGTTGGGAATGAAAAGGAACTGTGGAAGATTGACTTCAATACTTCTCATT |
| | | CCGAACAGCTTATCGAATACATTAAGTATACCTTCAATGACAATTTGAAAAACGATCGTCAGTATCTGAATGAA |
| | | TATGTTACGAATGATGTGCAGATACAAAAGGACTTTAATAAAGTTAAGAACGTTTTTTCAGAGCTGCGTCATGC |
| | | CTTGCTGCACTTTAACTATGATTTTTTCCAGAAACTTTTCAACGGGCAGGATGTGGGCTTTGATTTGGACATCGA |
| | | GTTTTTAAACCTGTTCATTGATAATATAGACAAGCTGAATATAGAGACGAAAAAAGAGTTTATCGGAGATGAAA |
| | | AAATCCGACTTTTTGGTGAAAACCTGAGCCTTGCAAAAGTGTATGAACTCTATTCCCATATTTGCGTGAACAGAG |
| | | TTGGATTCAACAAGTTTATCAATAGTATGCTCATAAAAGACGGTATTGAAAATGAAGCCCTGAAAGACAAGTTT |
| | | AGTACCAAGTTTACTGGAAATGCCTATTATATCGATATTCATAATTCCCGTGAGTATAAAGACCTCTATAAGAAA |
| | | CACAAACGTCTGGTGATTAACGTTTCAACACTCAAAGATGGGAGAGCCATTCGTCAAGAGAATAAAAAAATAG |
| | | CTGAACTGAAAAAACAGATGACCACCATGACAACTACGAATTCTTTGGCTCGATTAGAATGTAAACTGCGGCTG |
| | | GCATTCGGCTTTCTCTACAATGAATACAATGACTACAAAGCTTTCAAAAATTCATTCGACTCGAACCTGAAAAAC |
| | | AATCAGTTTGACGTTAGCAATGTTGATACATCGAAAGCGTATTTCCTTTCTACTTATGAGAACCGTAAACCACGC |
| | | ACAAGAGAACGTATTGACAAAGTTTTAAAAGAAATTGAATCTCTGGAGCTGAAAGGGCTTATCGCGAATGATCC |
| | | CCTGTTAAAATTCATCTTGCTGATGTTCGTCTTTATGCCGCAGGCGTTAAAGGGTGAATTTCTTGGTTTTGTAAAA |
| | | AAGTACTATCATGATGTACACAGCATTGAGAAAGATACGAAAGATAAAGAAGAGGACTTAATAGAATTCATGC |
| | | CGTTGTCGTTAAAACTGAAGATTTTAGGCCGGAACATACGAACCTTAACACTGTTTAAGTATGCGCTCGGCTCAC |
| | | CGATAAACTATAATAGCACCGACGAAGTATTTTATGTCGAAGGAAATCGTTATGGTAAAGTTTATAAACAGTTG |
| | | GGTATTTCTCACAATCAAGAGGAATTTGATAAAACACTGACGGTTTCCCTTTTACGTTACTACTCGGCATTATTC |
| | | AAACTGGTAAACGATTTTGAAATCTATTCACTGGCGAAAGGCAATCCTACGGTGGTCAACTTAGATGTGTTGGT |
| | | GGATGATAGTAGTTCCCCGTATAAGTTTCGCGGCTTCTACAATTTTGGAAATATGATCGGTCAGATTCATGGTCT |
| | | CACTCACAATCAAATTAAGAATGAAGAGATCATGATTAGAAACAAGATAGCACACTTCGACATCGAAATGTTAC |
| | | TGAAAAAGCCTCTGCTGGCTCAAATTAAGTTGGATGTGCAGAGAAAAAACTTGATTAAGTTTATAGAGGATCGC |
| | | GGCGATATGAAGAGTGTATTAGGTTATGATGCTATTAATGACTTTAGCATGAAGATGGTTCATCTTCGGACAAA |
| | | AATCAAGGTAAACAGCGATAAGCTGCAAATCATGATGGGCTTATTGACTAATGTCAAAACCCCAAACGATTTTT |
| | | ACAACATCTACAAAGTCAAAGGTATAGAAAGCATTAATCAGCATCTTCTGGATGTCATTGGGGTAACAGAGTCC |
| | | GAAAAAAAGATTGAAAAAGAGATAAACGAGGGTAATAAACGCGCAGTAAAATAA |
| 286 | JW13107 | ATGGAAAATCTTAGTAAAGAACAAATAGTAGAAACTCAGGAGCAAAACAAAAGAACGTGGGGTAATGACCCTC |
| | | AGTATTTTGGGGCCTATCTGAATATGGCACGGTTAAACATCTATAATGTAAGCAATCATCTTGCCGAAAAATTTG |
| | | GTATTACCGCGATTGAGAATGAAGAGCAGATTTCAAATAGTTTCTTGGGGGATAAAGAGAATAAAGTTTTCAAG |
| | | AACAAGCAGAACCATATATTTTCCAATCTGATACGTTATCTGCCTATTGTAAAGGTTTTCGATTTCGAGAAACTC |
| | | CCCGAAGAAGAGAAAATCTCACTGAAAGATAATTTCGGTAAAGATTTTAAAGAACTCTCAGACACGCTGAAAAT |
| | | TATCTTTAGTGAAATAAACGAGTTTCGTAATGACTATTCTCACTATTTTTCTACCGAAAAAAAGAACAAACGTAA |
| | | GACAAAAGTCTCTGATAAGTTAAAGGACTTCTTAAACATTAACTATACCCGTGCTATTCAATATACAAAAAACC |
| | | GCTTTATCAACGTCTTTTCAGATAATGATTTCTGCCTGGCAGAGGAAGCGAAACTGGTCGAAAATGATAATACA |
| | | ATTACACAGGATGGTATCGTATTTTTTACCTCTATGTTTCTGGACAGAGAAAATGCTTTTCAGTTCATCTCGAAA |
| | | ATAAAAGGGCTGAAGGGCACACAAACAAAAGCGTTTAAAGCAAAACGTGAAGTCCTGATGGCCTTTTGCATCA |
| | | ATCTGCCACACGATAAGTTTGTTAGCGAAAATACAGAACAGGCATTTTCTTTAGAACTCATTAACGAACTGAAC |
| | | AAATGTCCGAAAACACTTTATAACGTGATCTCTGAAAATGAGAAACAACATTTTTTACCGAAACTTGAGGACGA |
| | | ACAAATTGATAATGTGTTGGAGAATAGCGTTCCCTATACTATTGATGATTACGAAAATTACATCGAGAACATTA |
| | | CCAAAAAAGTCCGTAATAAGAACCGCTTCTCCTATTTTGCCTTAAAATTCATCGATCAAAAGGAGCTGTTCAAA |
| | | AATTGGAAATTTCAGATTGATCTGGGTAAAGTTGTGTTGGACGAATATACCAAAACCTTACAAGGCAAAGACGA |
| | | AACGAGAACGGTTGTGGAAAATGCGAAAGCGTTTGGCAAACTTCAGCACCTGAACGACGAGGAAAATGTTCTT |
| | | AATAAAATCAACAAAAGCGAAAGCAAAACCCATTTTGAACAATTCGCTCCGCATTATAATTTTGACAATAATAA |
| | | AATCGGTATCTCCCGTAAAGAGGATAGCGCGATATTCATTTCACGCAACACAGATAAGAAAGTCAAGTTTAATC |
| | | TGAAACAACCGCTGCCTGAAGCATTTTTATCTATTCACGAACTGCCCAAAATCATCCTGTTGGAATATCTTGAAA |
| | | ATGGCAAGACGGAACAGCTGATAAACGATTTCATTGAGATCAATAATTCGAAAATCCTGAACAAAAAGTTCATT |
| | | GAATCCATTAAGAGTAAGCTGACCGATTTTAACACCTTTAACAAGCGGAGTCAGGGTCGCAAAGAGAAATCCGC |
| | | GTATAAGAAAGAAGCCTTAAAATATTTGCTCGATCGCAAAGAAAAGCTGAATCAGATATTAGCCGAATACAATC |
| | | TGAATGTGAAACAAATTCCAACCCGGATTTTAGATTATTGGTTAAACGTAGCCGATGTTCAGGAAAAAACCGCA |
| | | ATTTCCGATCGTATTAAGCTGATGAAACGCGATTGCATGGACCGGATTAAAGCGATGAAAAAGGGAAAAGCCC |
| | | CGAAAATTGGCGAAATGGCAACTTTTATTGCCAAGGATATCGTTGATATGATTATTGGGGAAGAAAAAAAGAAG |
| | | AAAATAACGAGCTTCTACTACGATAAAATGCAGGAATGTCTTGCTTTATTTGCCGACAAAGAGAAAAAAGAACT |
| | | CTTCATACACATTTGTAATAACGAACTCAAACTGAATGAATCGGATGGGCATCCATTTTTAAAGAATATTATACT |
| | | TTACGATTACCGCTATACTTCCGATTTGTATAGACGATACCTTGAAGAAAAAGCTGATAATCGCAACAATCTTAA |
| | | CAAAAACGACACGTCATGGCTGGCTAAGAATTTTTACTTCATCGAAAAAGTTGAGGTCTTCGACAAACGGCTGA |
| | | ACCGAATGGAGTTCAAACCTCAAACAGTGGTGAAAATTAAGGATAAAAGCAAAATCCCATTCACTTTACGACAG |
| | | TTAGAAAAAGAGAAATCTTCCTTTGATACGTGGTTTGAAAACATCACAAAGGGCAAAGAAACAACTGATAAAA |
| | | AGAAACCCGTAGACCTTCCGACCAACTTGTTTGATAACTATCTTAAAGAGCTTCTGATTAAAGATCTGTCGAAAA |
| | | ACAACATCAAGTTCAATCCTAAGACGAACTATAATGAATTGTTTAAGCTGTGGTGGAAAGAGTGTCGGAAAGAT |
| | | AAAACTCAGAGTTTTTACAATGCTGAGCGTGAATATTCATTTGAGGACAAAAAGCTCAATTTTAAGATCAATAC |
| | | GAAATCAAAATTTGAGGACTACATCAATCCGGAGTTCGCAGAGAAAGTGTTCAAACTTAAAAGTAGCCGCCGTG |
| | | AAAAGGAAAATAGTACTGGTCGTAAACTTCCGCCATTGATGATCAAAGATCTTGAAAAAAGCATGGCGAACAA |
| | | AATTGGAAGTATTGAGAAAGATATCAGAATATTACAGGAAGATGACTGCATGATGCTGCTGATGTTTGAAAAAC |
| | | TTGTAGACAATAATTTGGAACTGAAATTAGAGAATGTAGACACCCTCATGAACGAATCTATCGAGATAAAGCAG |
| | | AGTATTTTAGGAAAGCTCTCATTTGATGACTTTGGCGATAACGTGAACAAAAATGACCGCATAATAATTAGCAA |
| | | AAACATAACCGAGACCCGGAAACGTAAGGAATATTCAGTTCTGAAAAAATATATTTTCGATCGCAGATTGCCAG |
| | | AGCTCTTTGAGTATTTCGAAACCGAAGATATAACTATGGAAAAAATAAAGCTCGAATTGGGTACTTACAATAAA |
| | | GCAAAAGACATCGTGTTCGACTTAATTTTCGATTTGGAATCGGCTATTATTAAAAAAAACGAGAATCGAATCAA |
| | | GGAGCTGAATAAAGATAAGAATGGAAACATTCAGACGGGAAATATTCAGCATAAACCTTATCTGTTTTGGCTGT |
| | | TGGAAAAGAATCTGATTACAGAACAGGAGTTTACCTTTCTGAATATGGTTCGTAATACTTTTTCGCATAACCAGT |
| | | TTCCGCAGAAGAAAACAATGGAGCTGTTTATAAAGAATTGGAATAAAAACGAATACGCAAAGCAAATTCTGAC |
| | | GGTTTACACTGAAAAAATAAACAATCTTATCGAGAAAGTGATTGACATTTGA |
| 287 | JW13108 | ATGGAATCTTTCCCTGATTACAAACCGCTGTTTGCTGCCTATCTCAATATGGCCCGTAACAATTGTTTTATCGCGC |
| | | TGAGTCATATAGCAGAAAAAGCAAACAAAGGCGGCGGTATGAATGAAGATGCGATGCAGGAATGTAGTGTCAT |
| | | AACGCTCTTAGCCAATAATAAAAAGCCAGACGAGTCTTTAAAGGTCGAAGAAATGATCAAATATCATTTTCCAT |
| | | TCACCAAATCAACAAAGCGGATTGATCCGGTTCCTTCTGACTATGCGGGCCTCATCATTTCCTTTATTAAGCAGT |
| | | TGAACGAATTAAGAAATTTCCATACTCACTACTTGCATCGTCCGTATGCTACTGATGCTAATGTTATTGCGCAGT |
| | | TACAGTTTCTGTTCGATACTTCACGCAGAGAGGTGCGTAAGCGTTTTGCACTGAAAGAAGAGGATGTGAAACAC |
| | | CTCGTGCGTAAAACAATTACAATTATCAATGGCGAGAAAGTTGTAGTGGAAAAAGACAACTATCCTTACGCGTT |
| | | CGTAAACAAAGAGGGTCAATTCACAACAAAGGGCATAGCCTTTTTTATCACTCTCTTCCTTGAGAAAAAACATG |
| | | CATATCTGTTTCTCAAACAGCTGCGTGGATTCAAAAATAGTAGCAGCAAACAGAACAAAGCCACATTAGAAACC |
| | | TACTGCTTTTATCATATTCGTGTGCCTCAGCCAAGATTACAAAGCCAGGATACTAAAGTTGGGTATCTGCTGGAC |
| | | GTTTTGGAAGAATTAAAACGGTGTCCTAAAGAACTTTATTCTCATCTGTCAGAACACGACCGAATGCGTTTTACG |
| | | TTTGTTAACGACATTGATGCTACGGACGAGCAGCCGGAAAGCATTTTGAAACGTAACAAAGATCGTTTCGCGCA |
| | | TCTTGCATTGCGATATTTTGAGCATACTGGTAGTTTGAAAGAACTGCAGTTTTATTACGACCTGGGTAAGTATTA |
| | | TTTCAAAGTGTACGAAAAATCTGTCGATAGCGAGATTCGGCTTCGCCGCCTTCATAAGTACATGAAAGGATTTG |
| | | GTCGTTTGAATGACTTTGGCCTTGAAAACATGCCGCCCTTATGGCAACAATTGGTTAAGTACACCGACCAGTTAT |
| | | CTGAGGGGTATGCGGAACCTTATATTGTTTACACCATACCGCATTATCACATCGTCAATAATCAAATTGGTATCT |
| | | GGATTAACAATGGGTTTATACCGCCGCTGCTGTCGCCGGTGAGTAGTCCAGAACCACAGATGTGGCTCAGTATC |
| | | TATGAGCTGCCAGCGATAATGTTTTATCATTTGCTGACGAAAAAACGAAAAGAGTACAAAAGCGTCCTGCAGAT |
| | | CCTGTCTAACCACCGTAAAGCGATTCATCTTCTTTTCAAAGATATTAAGGATTCCAAACTGCTCCCCGATGCAGT |
| | | GGAAACCTTTGAGGCCGAATTAAGACAGCGGGGTTTACATCGCAACCACATCCCGAAGCCCTTGCTGGAATATC |
| | | TGCTGAATGAAAGCCCAGGAACGCCCGTAGCCGCCAAAGCAGAAAATCGCCTGATCAAGCTGCAAAACGAGAC |
| | | AAGCTTTCTGTTTGATAAGATCGATATTGATCTGGAAAAATCGAAAGAAAAGGCTGGGGGCAAATATTATAAGC |
| | | CGATTCAAACAGGTAAAATCGCTCAGTTTTTGGCAAAAGATATGCTGTTTTTCCAACCGCCGATTAACAAGCTGA |
| | | AAGGAAAAGCAACCGGTACTCTCTTTCAGGTTCTGCAGGCCCGTCTTGCTTTTTATGGCAGAGATAAACATCTTC |
| | | TCGAAGATATCTATCGCGAGTGTAATTTGATCCAATCAAACAACCCACACCCGTTTCTGCAAGGACTTCCTATTA |
| | | CGGATAGCCTGATCGATTATTATCGCAATTATCTTGTCCGGCGAAACACGTATCTTGAAAAATGCCTCAAAAAAT |
| | | GCATGCAGGGGAAAACCGGAAGCCAAGAGCTTCACTTTCTGCATCTTGGCGAACGAGAAAAACGCGCAGGTAA |
| | | TGATTATTATAAAGGGCTTGCGGGGAAATTCATCAAGATGCCATTAAACCTGCCCCGTGGTCTGTTTATGGAAG |
| | | AACTTCTGAAGGTTTTTTCAGCTGAGAATAAAACAATGCAGGACATCGCGGATAATTCGCGCACGAATACGGCT |
| | | TTTCTTATTAAAGAATACCTGAAAAACGTACTGGACGATGATACACAGGATTTCTACAACTGGAAAAGAACTTA |
| | | TGCAGTATTCAATAAGTACTACGACAATCGCAAACCCCAGAGCCGGGATAGTCTGATTGAACGATACTTCGATA |
| | | CCTCTGTGCTGTCAACCGAGGCGGAAAAAATTAAACTTGAAATTGTAAAAAAACAACGCGTCGATATAGAGGCT |
| | | TCCGAAAACATTAAACGTAATTATCGCTACTATAGTGAGAACGAAAAGCAGATCAGACACACCAAATCCTGCGA |
| | | CATAGTTTTATTTCTGATAATTCAAGACCTGTTCCCTTCGCTCGAGCAATCTGTATTCAAAGGTTTAGCAATTAAT |
| | | CAGTTAAAGCTGTCCGATATTTTACCTGATGCGGAAAAAGGCATTCTCTCATTGCCAATTGAGATACGCCTTCCG |
| | | CTGTATAACAAGTTCATCATCCAGCGGGGCATCAAACTGAAAAATTACGGTGACTTCCGTCGTTTTTTAAAAGAC |
| | | CGCCGGTTACAGTCGCTGTTACCTTATTTTGAGGAAGAATCCATTGACAGAGTGATAATTGAAAAGGAACTGCA |
| | | GGATTATGAAATAGCACGTATAGAGATTCATCGGCTTGTATTGGAGTTTGAAAAAAAGGTTATAACCGAGAATA |
| | | AGATCACATACGAAAACTCCGAGATTAATTATGTTGATCATGAAAAAGTGCTGACCGCTTTCTTTCAGAATGAG |
| | | CCTTCCTCTAATAAAAAAGAGCTGATACGCGACATTAGAAATAAGTTCTCGCACAATGAATATCCGGATGCAAA |
| | | TAAGTTTAAAGGATTAATTGAATCAGATTCACTTAATACGACTGTCGCCAAAAAGTTTATCCAAATAGCCAAGC |
| | | AGTACTACCAGTTTGAAATTGCCCCCGCCCCGCCCTTGTTAGTGTTATCACCAACCAGTACCACTATTTTGTAA |
| 288 | JW13110 | ATGTCCATAATGAATATTATAACCGTTTTAAACCATATTCACCAGATCGCTGGGTTAAAACGAAATGAACTTGGC |
| | | GATGATGATAACATCTATTCACACCCCGTGCTCAAATACATTGCCCCTGAAAATAATAGCACCACGTTGCCGGA |
| | | GAAACGCGATCTGATAAAAGAGCTGCTTTTGGAGTATCTGCCCTTTCTTGAAGCAATGAAAGATTGTTACAAAG |
| | | AGGTCAAAGTAGAGAAAGATAAACGAAACAATAAGTATGTGAAAGACAAAAAACAGGTCTTTATCCGCAATTA |
| | | CTCGGATATCTATTGTATCTACTGGACTCTGTACAACATCTTCTCCACCTTGATAAACTATCGTGATAAAAGTTGT |
| | | CATTATCGTTTTATCCCTAGCAAAGACCAAGAAGAATATTCCAAACGCACAGAGTATGATACAGTACGTATAAT |
| | | AAACAAATATTACACATACGCGTTACGGAAAACCAAAGAAAAGTACGGTTACACGACCGAACAACTCTCTTTTA |
| | | TTCAAAATAACCGGTATACAGATGACAAGAAGGTGAACTTTAATTTCTTTTTATCGATGCAGTCCTCGAATAATA |
| | | ATCTTTCGCATGTTGGCGTTGCACAGCTGATCTGTCTGTTTTTACAAAAGAAAGATGTTGATAATTTCTTGGAGA |
| | | ATTTGCCAATCTATGACAATCGTTATTGCCTGGGCATTGATGAACACATGATAATCAAACGTTCTTTAGCCTTAC |
| | | ATAGTATAAAGCTGCCAAAAGAGCGCCTTAACAGTGAGAAAAAAGATATGGCAATTGCAATGGATATGCTCAA |
| | | TGAATTAAAGCGTTGCCCAAAAGAATTGTTCAATACCTTACCATTTGATAAACAGGAACGCTTTCGTATTATCTC |
| | | ATCAGACCATAAAGAGGTGTTGCTGATGCGCAGCACCGATAGATTCGTCCCTCTGATTCTGCAATATATCGACTG |
| | | CAACAAAAAATTCAAGGATATCCGCTTTCATGTCAATATGGGTAAACTGAGATATTTGTTCTCCCCTAATAAACT |
| | | GTGCATCGACAATCAGGAGCGTGTGCGCATGTTGGAACATCTGTTAAACGGCTATGGACGGATAGATGAAGTGG |
| | | AATATCTGCGCAAGGCTCCTAACGGTACGTTCGGCAATACCAATATACCTATAAAGGGGTTTGGCGAAATTGAA |
| | | CGTGACTCTGCTGACAGCAACAACTATCCGTACATCGTAGACACACATACACACTACATTCTGAATAATAATAA |
| | | AGTAGAGTTCTGCTTTTGCGAAGATAGTAAGAATAAGAATGTCTTCCCAACTATTGAAAAGGAAATAAACGGAA |
| | | AATGGTATGTTGAGAAAACTGCCCCGCATTGCCGTATTAGTTTCTTTGAAATTCCGGCAATGGCGTTCCACATGT |
| | | TTCTGTGTGGAAGCGAAAAAACCGAAAAGCTCATCAAGGATGTTTACAATAACTATATCAGCCTCTTTAATGCG |
| | | TTAAAGAATGGCGCCTTGACCGAAGAGAATTATAAAGATTTTAACATACCGGAATGTGACATGCCCAAAAAGAT |
| | | ACTGGATTTTCTGAAAGGCAAAGCCGAAGGGAAATCAATTGATGGTTATGTAAAGAACATTTTAAAAAAGGAG |
| | | CTGAAAGATACGCGGAAACGAATTGAACAGGCGCCATCGGAAAAGGACCAGATGCCCTCAAAACGTAATAAGA |
| | | TAGGTACCAAAAGTTACAAAAGAGTCCTCACGGGGAAACTTGCCGACTTTCTGGCCAAAGATATTGTGAAATAT |
| | | CAGCCAACGCTGTGCGCAGGGGATGATTATGGCATTGACCGTATGACGGGTATGAACTATCGGATTATGCAAGC |
| | | GACCATTGCGACCTATAATGACGATGATGATTTTGACACGTTCTACAATGTGTTTAAAATGGCGGGTCTGGTTGA |
| | | TGGTGACGAGCGTAAAAACCATCCGTTCTTAAAAAAAGTTCTTCTTAGTAAACCCCAGAATACGGTAGCTTTTA |
| | | ACATCAAATATCTCAAAGAAAAAGAGATCTACCTGCGCAATATTGAGAAAAAAAATATCATTCCGCCGTTTGTT |
| | | AACCGAGAGAGAAATAAGTGGTGCGAACGCGACTGTGAATATTACAGAATTCTGGGAGAAAATCTGCTTGACTT |
| | | ACCGATTGAACTGCCACGTCAGATGTTCTACAAAGATATTCGGGCTCAACTTGAACCGTTAATGCCTGAGATTG |
| | | ATTTTAGCCAAACTAATACTACATATCTGATTGCTGAATATCTGAAACGCGTTCGTGGTGATGATTTTCAGGAGT |
| | | TCTATTCTTGGGAAAGAAATTACAGATATATCGACTTTCTGAAATGTATCCGGGATGATAATGGACGCATTTGTG |
| | | CGCAATATACAACGACAGAGGAACGGGAATCTTTATGGGAAGATAGCAAAAACCGGACCGCTGAATATAAACG |
| | | ATCTGAGGAGCAGAAGAATGAAAAAAAAGATAAAAACTTTGAAGACAGTTTGGAAGAACGTATATCATCAAGC |
| | | CACATCAAGTTTCAGAATACTGAAAAACATATTCGTAGATACAAAGTCCAGGATGCTCTGTTGTTTATGATTGCG |
| | | GAAAAACAGTTTGGGAAGTATCTTGATGATATTAAAGCCAAGAACTTTAAGCTTAAGGATATTATGCCCGACAC |
| | | GGACAAAGGTATTCTCTCTGAGACAATGCCTATTGATTTCACTTTCACAAAAAAGAACATTAAGTATAACATCC |
| | | ACGCTAAAAATCTCAAGTTTAAAGAGTACGGTGATCTTTTCATATTGGCAAATGACAAACGCCTGGAATCATTG |
| | | TGGAAAATCCTGGCGACCGACACTGTGAACAAAGAAGAAATTTCTGAAGAGTTTGCAAAATATGATTTTTGTCG |
| | | TCCGGACATTACTAAACTGGTTCTTGATTTTGAAAAAGATGTACTTGAGAAGTATCCTGAGATTATTGAAGAGGC |
| | | AGAAAAGGAGTATAAGAAATTTGACTTCAAGTTCATCTTAGATTGGCTGATTAACAAGAAAAAACTCAACTACG |
| | | GAATACGCAACAAGCTGTTACTGATCAGAAATGCCTTTAATCATAACTCCTATCCGGATAAAAAATATGCAGAG |
| | | GTGCGAGAATTACCGGAAATTGCAACTAATCTGAAAAAAACATTTGACGAAAACGCCAAAAAATACGAATAA |
| 289 | JW13112 | ATGCGCATTGTCAAACCTTATGGACGCAGTCATGTTGAGCCAGCCGCTACAGGTAGCACTCGTCGTGTACTGCG |
| | | CTTGCGTCCGCCGAACGACAAAGATGCCAAAGATATCGAAGCATTTGCACGCTCTCATGAAGAGCTTGTGATTG |
| | | CGCAATGGATATCAGCGCTCGACAAAATTGCAACCAAGCCTTCCGGTAAAGACGGTGCCAGCGATGCGCAACG |
| | | CGCTTTTCGGGAACGGTTAGGAAACGCGGCCTGGACGCTGCTGGAAACGAAAGGGCTGCTTCCCGGCTTGGTGA |
| | | CACGGCGTGAACACTTAACCATGCTGTGGCGTGCAAAAGTCCATCCATACGGATCGACACCATACCGGCCGAAA |
| | | AGAGGTAAACCTGCACCTTCGCTGAAAGGGCGTCGATATGAGCGTTTCGCCGGCCAGCTCGAAGTGGATAAGGT |
| | | AGATGCAGCAGCAATCGCGGCGAGCATTCATGCACATCTTCATGGGACAGCTGTACCAGCGGTCCGCCCCGGAT |
| | | TGATAGCCACTCGTGCACGCTCAATTGCGGAGAACGTGCTTCGCCCACCGCAGCGGCTGCCTAATGAGGAACGG |
| | | TCGTGGTCCGATGACGATGAGCGAGCCTATGCTGCTGCAGGCGATGTAGCCCGCGAAATTCAAGAGTTAGCGAT |
| | | CGCAATCGAGGAAGACGCAAGCCAGCGGCGCCGTGGAAAGCCGCTTACCCGTAGCCCATTTGCTTTACGTGATG |
| | | CAGCTCCCGCTTTGCGCGGCCAATATGGTAGATTATTAGTGGATGCGTCGGGTGATGCCCTGCCTATTGCTCAGG |
| | | CGCGCGCTGCGTTTCCTGGCTTATTTGGCCTGCACATGGCGGTGCGAGACTGTTATTCGCGCATTCTGAAAGATC |
| | | ATAGAAAAAGTTCTGTCGTACGCATCTTGCCGCGCGATATGGAAGAGTTGCTCCGGCTGGTTGGGGCAAAACTG |
| | | ACTAATCGCGATCTCAATGCGATGGTAAGACTGGGGAAGGTTATTCATTACCAGTCGTCTCTTGGCGTCGAAGA |
| | | TAGTCCTGAAAATGTGGCGGCCAATTGGCCCGCAGACGTGTCTGGAAGCGAGTTTTGGACCAGTGCCGGGCAGG |
| | | CTCAGATTAAACGCAACGAGGCTTTTGTACGCGTATGGAGACATGTCCTGGCTCTGGCCCAAAGAACTTTAACG |
| | | GATTGGATCGATCCCCAGGGTAAGACACAAGGTGATATTCTGTTAGCGAATCCGCCCTTTAATCGTGACGCCTAT |
| | | AATCGCAAATCTGATCTTCTGTTCGGCAAAAGAGCCTCACTTTTTAAGGGCGTTGAGACATTTGAAAATGTCGTG |
| | | CTGACACTTGCTCGCCGTGAAACCGCAGCCCTGCGTCATGGTTCTTTTCATTTCAAAGGATTAGGCGGATTCACC |
| | | AAGGTTTTGGCCGAAGTTCCAAAGACCGACGCATCCGTGCTTGCCGCGGTTCGGACGTTATGGGAAGATGATTT |
| | | GAGTGAACGAGCACAGCGCCTGCGTCAGACGCTGCGCGGCGCTCATGTAGAGTATTTCCTCGACGAAGCGCAGG |
| | | GTAGACGACTTTTATCTGCGGTGCTCGCAGATTCAGGACCGGCAACCTTGCCGCTGCCACGCTTTAGACGTATTC |
| | | TGCAGCGAGCACATAATGCATGGGCAAAGGAAACCGATGGTCCCGGTTTACCTGAGCCTGCAAACCGCATGGA |
| | | CATTAAGACATATCCGGCCCTGCATTGCCGGTATGTAGCTCTGAAACATGTTTACGAACGGCCATTTCGGCATTG |
| | | GCTTGAACAGCGAGACGCCGCGTCACTCAATCGTCACATTGATCGTGCGGTTGATCGAGGTACTAAAGCGGCTC |
| | | GTGATCTGAACGCGGGCGACGATGAAGACCGTCGTCGTATTATAGTCGCTCGTGCAGCCTCTCTCGGTCGTTTAG |
| | | CCGAAGATGATAATGTTCAGGATTTTTTCTTCGAGCTGTCAGCCGAAACAGCCGGCGAAATGCGTGTTCAACGT |
| | | GGATATGCAAGCGATGCCGAGGCTGCTCGGGAACAGGCTGGGTACATCGAGGACCTGAAATGCGATGTGTTAG |
| | | CGCTCACCTTTGCCGACTATCTGAAAGCTGCCGGGCTGGATTTCATACGTATCTTGGCGCCGGAGACGCCGAGA |
| | | CCCGACAATGCAGCATATAATCTCGATGCTATAGAGGCACCGGAAATTGATACTCCGGGTGAAGATTGGCAGCG |
| | | GGTTCTCTATTTTATCTTACACCTCGTGCCGGTGGAAGATGTTGGTCGGTTGCTGCACCAGACTAGAAAATGGGA |
| | | AATTCTGGCCGGGGATGAAACGCTTTCCCCCTCAGTGCGGGACCGACTTCGGGGGATTCAATTGGCTCTGGAAT |
| | | TGTACTTAGACATGCATGACGCCAAATTCGAAGGTGGCGCCGCACTCGTTGGTACCGGCGCATTCAAGGATCTC |
| | | TTTGAAACTGCACGTATATTCGACGACATTTTTCCTTCTCAGCCCGGATCCGCGCAGACTGCGGATGACGAACGC |
| | | CGCGTGCCAAAACGGGGTTTGTGTGAAATTATGCGCTTCGGTCACCGTCCGGCACTTCAGCCGATCTTTAGCCGC |
| | | TACCGCGTCACCGAACGTGAAGTTGAAGAAGTCCGCGCCATGGAATGGCCGGTGGACGGTACCTCAGAAATAG |
| | | CCAGACTGCAGGACCGTCGCGAAAGACTGCACAAAGGATGGACGGAAAACAAAAGTGGGCTTTCCGGTGATGA |
| | | TCTGAGAGCCTATGTCGCTGCGTTGCGTGAGGTTGCAGCTCATCGCCACCTCGCCGCGCATGTCACCCTGACAAA |
| | | CCACGTGCGTCTTCACCGTCTTTTGATGGCAGTGCTCGGGCGGCTGGTCGATTATTCCGGCTTATGGGAGCGCGA |
| | | TCTCTACTTTGTAACCCTGGCTTTAATACACCGTGCTGGCAGACGGCCGGCGGATGTTTTACCAGCAGATGGGTT |
| | | ACGATTTCTGGCCAATGGTCAGATTGTTGAGGCAGTTCGACGACTTGAGCCAGACCTGCAAAGCCGTCTGCTCG |
| | | ACTGTTTGGGCGATATCGATAAAAACGGGAAAGTACGCATCCGTAACCGCTTTGCACACTTCAATATGCTGCAA |
| | | CCTGGAAACTTACCTGTTGATCTGACTCGTTGCGTTAACGATGCGCGCGAACTGATGGCCTACGATCGTAAACTC |
| | | AGAAATGCGGTGACTCAATCAGTTAAAGAACTGTTAGCGCGCGAAGGTCTGATGTTAGGCTGGGCTATGGGCGC |
| | | TGATCATCGCCTGAGTGCTGCGACACTGGCGACGAGACAGGCGCAACACCTGGGTAAAACGCGCCGCGGCGAA |
| | | AAGGGTTGGCATGAGCGTAAGTTACGTCCGATACCAATCCTTGAGGACCTGCATGGCCGTCGCTTTGTTGATATG |
| | | GCTGCCGCCTTGTTTGGCGGAACCAGACTGGAACCGGAGCGCAGCCTTCTCGATCATCCTCTGGACCGCATCGA |
| | | GTGGAACCCGACGCCGAAAAATCGGTATGGGAGTCGCCCTACAAGTGGACAAGGTCGAAGAAATGTCGTACCA |
| | | CGATAA |
| 290 | JW13113 | ATGGAAAACCAGGAGCTGAAGACACGCACCATGAAAAGCGAACCATATTATTATGGGGCCTTCCTGAACATGG |
| | | CCCGTTTAAACATTTTCAACATTAGCAACCACTTATCGAATAAACTGAACATTCTGCCCACCCTGTCCAGTGAAG |
| | | AGCATATTGCTAATGCGTTTTTTACCGACAAAAATACCAAAATAAAATGGGAGCATACGTACGACATTCTGAGA |
| | | CGTTTTATCCCCATCGTTAAAGTTTTCGATACGGAATCTTTGCCAAAAGGAGAAGTCGGTAACAATACGGGAAA |
| | | AGACTTCTCCAAAATGTCGGATACCTTAAAAATTATTTTTAAAGAGCTTAACGAGTTTCGCAATGATTACTCTCA |
| | | CTATTACTCGACCGAAAAAGAGGATAAACGCAAAATTACTATTTCAGATGAACTGGCCAATTTTTTAAACGAGA |
| | | ACTTTAAACGCGCCATTGCTTATACCAAAAAACGTTTTAAAGGCGTCTTTACTGAGAAAGATTTCGAGCTTGCCA |
| | | ACAATATCCAATTATTCAATAAGGATAAAGAAATTACCGAAAAAGGACTTGCGTTTCTCACGTCAATATTTTTAG |
| | | AACGCGAGTACGCATTTCAGTTTATCAGCAAAATAGAAGGACTGAAAGGGACCCAGAAATCAGAATATCGAGC |
| | | GACACGTGAAGTTTTTATGGCATATTGTGTTAATTTGCCGCATGATAAGTTTATTAGTGAAGATGCAAAGCAGTC |
| | | ATTCTCTCTTGATATAATTAGTGAACTGAACCGTTGTCCCCAAACCTTGTTTAATGTAATCACGGAAAAGGAACA |
| | | GGAAAAATTTCGGCCGACTATAAACCAGCAGGAGAAAAACAACATTATAAACAATAGTGTTCCGTATGATATCG |
| | | AGGATTACGAAGAGTATGTAAACAGTATTACTAAGAAGATTCGGTATGATAATCGTTTTCCATTTTTTGCGCTGA |
| | | AATTCATAGACGAAACTCAAGTCTTTGAAAAAATACGTTTCCAGATCGACCTCGGGGAAATACTGCTGGATGAA |
| | | TATACGAAGCAGTTGGCAAATAATGAGGAAAAAAGACAAGTAGTGCAAAATGCGAAAGCGTTTGGCCGCCTGA |
| | | ACGATTTCATTGACGAGAATAATGTGCTGGAGAATATTAATAAGCAGAATGGCTCTGCTTCGTTTATCCAGTATG |
| | | CCCCGAATTATAATTTTGATAACAATAAAATCGGTATCGACACAACGGGTAAACGGATTATGCCTATACTCACT |
| | | AAGCAGACAGACAATAACAAGAAAGTTAAAAACAAGTTAAAACAACCTCTGCCGAAAGCGTTTCTGTCAATCC |
| | | ATGAATTGCCTAAAATTATTCTGCTTGAGTACCTGGAAAAAGGTAAGGCAGAAAAGTTGATTAATGATTTTTTAT |
| | | TGATCAACGAATCCCAGCTGCTTAATTACAAATATATCGAGGAAATCAAAAACAAACTGAACAATTTCGACGTT |
| | | TTTCAGAAACGGAGTCAACGTAAAAAACTGCAGACAGCTTATAACAAGACCAACATAGAGGAATTACAGAGCC |
| | | GTAAAGAAGAATTAAACAAAATCCTGAAAGAATACAAGCTTAATGATAAGCAGATTCCGACCCGTATTCTGGA |
| | | ATATTGGCTGAATATCGAAGATGTAACGCCAAATGAGGCTATTTCTGATCGCATAAAACTTATGAAAAGAGACT |
| | | GTGTGGATCGGCTGCGCGACATAAAAAAAGGTAAAGCCCCGAAAATAGGAGAAATGGCCACGTTCATTGCTAA |
| | | AGATATTGTGGATATGATTATTAGCAAAGATATCAAACAGAAGATCTCATCATTCTACTATGATAAAATCCAGG |
| | | AATGCTTAGCTCTCTACAACGTTTCCGAAAAACGGGATTTGTTTTTGACAATTTGCAATGAACTGCGATTGCTGG |
| | | ATGCCGATAAAGGCCACCCGTTTCTGAAGAACATCAACTTGAATAGAATCAACTATACATCCGATTTTTATGTCA |
| | | AGTACCTGCAGGAAAAGGGGCATAAACTTATTAAAGAGACGAACTATAGAACAGGTAAGCTCGTGGAGAAAGA |
| | | TAAAAGTTGGATGTTCCTTAACTTTTATTATCTCAAGAAGAATGAGACACTTAATAAGATGATGACCATCGTGCA |
| | | GCTCCCAGATGATAAAAGCAAACTGCCTTTTACTATTGCACAATTAGACAAACCCAAGAATACTTTCGAAGAAT |
| | | GGATTAATAACATTACTAAGGGTAAGACCAAGACAGATAAGGAAAAACCTATTGACTTGCCTACAAATATTTTT |
| | | GACAAGGAGATCGAGGAGATCTTGAAAAACAAGCTCTCGGAAGAGAAAATTGCGTTTACGGAAAATGCAAATT |
| | | ATAATCAGCTGTTTAAACTTTGGTGGACCGATTGCCGCAAAGACAATGTGCAGAAATTTTATGATGCTGAACGT |
| | | GAATATGTCATCTATGATGAACATGTGAAATTCATTCCAAATACAAAACCTAAGTTTGAAAACTACTATAACGA |
| | | AAGTTTTCCGATAGTTTTAACCCGTTTAAAAAGAGATCGCGAAGAAGCACGTAAGCTTAATCGCAAACTCCCGC |
| | | CCATTGAAAAATCCCAAGTTGAAAAAGTATTCAAACAAGCGATCGGTTCTACCGAAAAAGAAATTCGACTGTTG |
| | | CAGGAAGAAGATCGTATAATGCTGCTGATGTTCGAACAACTGTTAGAGACTGACAATAATCTTAACCTGAAATT |
| | | AAACAATGCAGAAAGCTTGCTGAATGAGCAAATCACTATTAAAGAGAAGATCAGCCTTAAACTTTCATTCAATG |
| | | AGCAAGAGGACAAAAAAGAGATAATAAAGACGATCATTGACAAGCGTAAGCGCAAAGACTTTTCTATTCTCCG |
| | | AAAATTCAAGTATGATAAACGGTTACCAGAATTATGTGAATATTTCGAAACAGATGATATAAGCCATTCTGATC |
| | | TGAAGAAAGAGTTAGACGAATATAATAAAGCAAAGGAACAAATTTTGGCTAATGCCTTTATGTTAGAGAAAACT |
| | | ATTATCGAAAAAGACAAAGATGGGATAAAAGCCCTGTTCCTTAATGACAATGGCGAAAAAAAATACGGTAATG |
| | | TCCAGCATAAACCTTACCTGACGTGGCTGAAAAATAAAGGCCTCATTAACGATAACGAGTACTTGTTCATAAAC |
| | | ATGGTAAGAAATACATTTTCCCACAATCAGTTTCCGCAAAAGCGAACTATTCAGATTTTCATAGACAAAAATCG |
| | | CGGCAATCCGATAACCTTTGCAGAGACAATTAAGAATGCGTACAATAAAAAAATCGAGGAAATTATCGTGAAA |
| | | ATCAAATAA |
| 291 | JW13114 | ATGGAAACACAGGAAAATGAATTATTTGAAAACCGTCGGCGAACATTAGCGGATGATCCACAGTATTTCGGTGC |
| | | GTACCTTAACCTTGCCCGCCTGAATATTTTCTCAATTAACAACTATCTGGCAAAAGAGTTTCAACAGACGGAACT |
| | | GCGTGATGACGAACTTATCCAAAATGGCTTTATTTGTATTCCAAGTCAGAAGAACCGGAATGATAATAAGCTGT |
| | | TCGAGCGCCTTATTCGCCTGATGCCGGTTATCAAACAGTTTGATGCTGCACGACTGCCTAATGAAGAGCAGAAA |
| | | AGCGGACAAGCTGAAGGTAAAGATATAAAGACTATGGCGAAAACGCTGAAAGCACTTTTCAAAGATATGCAGG |
| | | AGTTTCGGAATGATTATACCCATTTTTATGCTACCGACAAACAGGAGTGCCGCAAACTGACTGTTTCATCCGAAA |
| | | CGGCAACGTTTTTAAAAGCGAGTTTTGCCCGTGCGATCGAATATAGTAAAGTCCGGTTCAAGGATGTACTGGCT |
| | | GAAGATGATTATAGCTTAGTAGCAGGCAAAGAGCTGGTGGAAGATGAAAATACGATTACCACCGAAGGGCTGG |
| | | TTTTTTTTACAGCTTTGTTTCTCGACCGCGAAAATGCGTTTCAGTTTATTGGCAAAGTGCAGGGGTTAAAGGGGA |
| | | CGCAATTCAAATCGTTTATTGCGACGCGTGAAGTGCTGATGGCCTACTGTGTACGTTTGCCTCATGATAAACTGA |
| | | TTTCCGATAATCCGATTCAGGCGCTGTTATTCGATATACTGAACGAACTGAACAAATGTCCAAAAAAGCTGTAC |
| | | AATGTATTGTCTGAAGAAGTGAAAAAAGAGTTCAGACCGGAATTATCCGAGAGCGGTATTGAAAACATGTTGGC |
| | | AAACAGTTTCAACGACGAAGAGCGGGAAAAGTTACTCGATGAGATTGAGTACAAAGAGTATATCGAACAACTG |
| | | ACAATCCGTGTGCGCCATAGTAATCGTTTTCACTATTTTGCTATGCGTTTTATCGACGAACAGGAGCTTTGGCCC |
| | | GGCATCCGTTTTCAGATCGATCTTGGCAAATACACCCTTACACAATACGACAAACAGGTCCTCGGCGAATCAAT |
| | | TCCTCGGTCTGTGGTAGAGAATACCCGGGCCTTCGGACGTTTAAGCAACTTTCTGACGGCAGATCCCGATTCGCT |
| | | GGAACAGCGCATCGATGTTGACCATCGGGCGAACGGATTCGAACAGTTTGCGCCGCACTATAATGCCGACATTA |
| | | ATAAAATAGGCATTGCCTTCACCGAGAAAGAACAGTTACCTTATGTTGTGCCGACAAAAAATGCAGAAACTAAC |
| | | CGTGTAAAATACTCCTTCAAACAGCCTCAACCAGATGCTTTTATCTCACTGCATGAATTAGCGAAAGCAATTTTG |
| | | CTCGAACAGTTGCAACCGGGTGAATCAGAAAAACTCATCCGTGCATTTTGCTCTACTGCGGAAAATAAGCTCTTT |
| | | AATCTTGAATTCATTGAATCCATCAAATGGAAGTTACCCGACTGGAAACCATTTCAGAAACAGTGTGACACTAA |
| | | AAAAAGCCGTGCTTATATCACAAAGAAAAAGATGTTCGCCTATGCACCAAGAGACAGAAAGAAACTGTTAGAT |
| | | GAGTTATTGGCTCCGTACGGTTTGAACTGGAAACAGGTGCCAGAAAGAATACTCAATTATTGGCTCAACATTGA |
| | | AGAGGTACACGATGCCCGTTCTATAAAGGAGCGCATTTTACTTATGAAACGCGATGGATTAAAACGACTGAAGC |
| | | AGTTAGAAAAACATCGGAAAGATCCGTCTATACGCATTCCGAAGGTGGGCGAAATGGCCACCTTCCTTGCCCGC |
| | | GACATAGTGGATATGATGATTGATAAGACAAAGAAGCAGAAAATAACCTCAATCTATTACGATAAAATGCAGG |
| | | AGTGTCTCGCCTTTTATGCCGATGCCGAGAAAAAGCGACAGTTTATTGGTTTGGTCCGCGAGCTTAATCTCAATG |
| | | CACCTGACGGCCATCCTTTCCTGAAGAATCTTAATCTCGAATCAATCCGTAAAACATCGGAGTTTTACAAACTCT |
| | | ATCTGATGGAAAAGGTTGAGAAAATGATAGAGAATGGGTACAAAAGCAATGGAGATAAAAGATTCAAAAATAT |
| | | CGCATGGATAATTCGGGTCTTTGAAGAAAAACAAAAAAACGAGAAAAACGGTAAAGATGACACTATCTATCGA |
| | | ATTCCAAATAATAGAAATGACATTCCCTATACTATACGGCAATGGGAAAAAGAGACTTCAACACTCGAAGAGTG |
| | | GCTTCACACTATCAATCATGGTAAACAGGAAGGCGACCGTAAACGCCCGATCGATTTGCCAACCGACCTGTTTG |
| | | ATGCTCGTCTGTGCGAACTGATGAAAGGGCAAATGCAAGAAAACGGACAGACATTTGCAGATACAGCCAAATA |
| | | TAACGAATTGCTGAAGCAGTGGTGGTCTCTGCGTGAAGATGAAACGCAACCGTTCTATAACGGTGCTCGTCATT |
| | | ATGTCATCAAAGAAGAGGCTGTCTGCTTTATGCCAGGTGCACAGCCCCGGCTGACTTCGTGCTATGCCGATGCG |
| | | GTTGAAGAAGCATATAATAGATTAAGTGCCGAACGTAATATTGCAAGACGGCACAACAAACAATTGCCTCTGAT |
| | | ACAGAAGCAAAAGGTGGAGAAGGTTTTCAAACATACGCTGTACGACACCGAGCGCGAGATACGCCTCTTAGGC |
| | | GAGCAAGACCGCATTTTGTTGCTGATGGCCGAACAGCTCACTCCGGGTAGAGAAACCCTGAAACTGAAAACCGT |
| | | TAGTGAAGAACTGACGCGACCTCGCGAAATTAAAAAGGAATTTCCTTATATCTCCAATTATAATGCGCAGGGTG |
| | | AGAAACTGCCGAAAGATGAGCCAAAACCGAAAATAAAAGTGACGGTAACCGGCATTATGCAGCTGAAAAATAG |
| | | CAACGATCTTAACCGCTTTGCCCATGACCGACGTATGCCTGAGCTGGTAGCCTATCTGCCCAATGCGACAATAG |
| | | ATGCTGATACCTTACGCTACGAATTGATGGATTATAATAAGGCGCGGCTCACTGTTTTTGACGCAGTGTTCAGAC |
| | | TTGAAAAGGCAATTATCGACCAAGACCGCGAGGGAGTTATTACTCTTTTTACCGATGAGCAGGGTGAAGCGAAG |
| | | CAGGGTCGTATGCAACACAAGCCCTATCTGCAATGGTTACTTAATAAAGGGATAATTACCCAGCCGGAAAGCTC |
| | | CTACCTGAACATGCTGCGTAATAGTTTTTCTCACAACCAGGTTCCGCATATTGCGGTTGCTCTCAACGGTACGGA |
| | | AGTtGTCCCGGTCAAAAACATTGCATCTACCATTGCTGGGGCTTACAAACAAAAAATCGAGACAATTATTGGGA |
| | | AGATCGGATAA |
| 292 | JW13115 | ATGAATAATAACATACTGGAACAGTCAACGTCAGGGTCAGAAAAACGAGCAAGCACCCGCACTCTGGAAGCTG |
| | | ACCCACAGTATTTTGGCGTATACATAAACATGGCGCGCCATAATGTATTTCAAATCATCAATGCGCTGACTCACA |
| | | AATTTTCCAAACAGATTGAGAATGCAAAACCGATTAACGATGATGAAAATATTGCTAACGATTATTTGATCAAC |
| | | ATAGGAAAAGGTACAGACAAGAGTCCTACTATTATTGAAGTGCTGAATCCGGCTCATCCGCTGCATCGCCTTTA |
| | | TGGCGAACACGTGTTCCGCGCGCTGAAACGGTATCTGCCCCTGGTTACTATTTTTGAAGTTCCGTCTATCAATAC |
| | | GGAAGATATTATTAAAGATACCGATGATATACTCCCCGTTCTCTTTCAAGACTTATATGAATTCATCACCCTGCT |
| | | TTTTTACGAGCTGGTTAAGTTTAGAGACGCCTATACCCACGCACTCGCTCTGGATGAACAGGGGAATATCGTACC |
| | | CAGAAAAATTGACCTGCACCCTAACCTCAGACACTATTTTGAACACCTGTTTTACAAAGCACCAGATTATACTTT |
| | | GCGCAGATTTCGTAGCACACAGGAAAAGATTGCGCATGGGTTTCATGAAAAAGATTTTGCGCTTTTAAAAGCAC |
| | | ATAACCTGTATCAAGACCCGCATTCTAACGAGCTGACGACACAAGGTCTCTTCTTTTTCACTACCCTGTTTCTGG |
| | | AACAGAAATATGCATATCAGTTTTTGAAGCGTTTCAACGGCTTCAAAAATGAGACTATCCAGCCTTTTAAAGCC |
| | | ACCTTGCGCGTGTTCACCGCATTCACCGTCAAACTTCCAAACGACAAACTTGCGAGTGATCATCCGGGTCAGTCA |
| | | TTCTTATTGGATATGCTCAATGAATTAAACAAAATTCCTCAGTCGCTGTTCAAACACCTGACACCGAAAGATCAG |
| | | GAAATGTTTGAGCGTATCAATGACGAGGCACTGACCAACATATTAAAAAATACCGATGAGGCTTCCTTTAAGGA |
| | | TGTAGACGATCTGCTGGGCAAGATGGCTCCGCTCATACGCCGGGAAGACCGTTTCCCTTACTTTGCTCTTTGGTT |
| | | TTTAGAGCAGACTAAGGCATTCAACCATATCCGTTTCCAGATTAGTATTGGGAAAATCGCCTACTCCCCATACGA |
| | | TAAGACCATCATAGGTGAGACGAGCCCGCGTATCATCAAATTTGATATCCATGGATTTGGCTCATTGGCCGAATT |
| | | CTCTGATGAAGATACGCTGTTAACGACCCTTAAACGGCAACTTCCCGCAGGCAGCCCACATGCATCATTGACTTT |
| | | TTCTCAATACGCTCCGCACTATCATATTAAGAATAATAAAATCGGCATTTTGGTGGATTACCCGTCGGGTGATCG |
| | | TCCATTATCCAACATCACACAACAGCCAGACGGAAAAATTAAAGTCAACCATATTAAACCGACAGCCTTCATCA |
| | | GCATTAACGAGTTACCAAAGTTGGTTGTTCTTGCTCTTCTCGGCACAAACAAAGACAATAAACCTATCGGTAATG |
| | | ATATTGAGCGTTTAATACGCAGCTTTATCACGAAATTCAAAAATCAGTTATTTCATCTGGCCCCTTTAACGAAAA |
| | | TTAAAAACGGACTTACCTTTTCACCTGAGACATTCACGCGTCGAATGGATAAAGACAAAATGGTCAAAGGACGC |
| | | ATTCCAAAAAGCGAACTGGCGAAGCGGGAAGAGTACAAAATCTATCTGGAAAAACGAAAGGCTGTGCTGCAAG |
| | | GTACAACAGACTTAAAGCTGAATGTTAATCAGCTGCCCACGAAAATACAGAACTATCTCCTGAATATTGATGAG |
| | | GTATCGGATGAAAAATCCATCCACCTCAGAATAAAGACTATGATCAAAGAGGTTGAATACCGCCTTAAGAAAAT |
| | | TGATCGAAACAAGCTGCCGAAAGTAGGTGACATTGCCACCTATATAGCCCGTGACATGCTTGATATGGTGGCAG |
| | | ATGTGCGGACCAAATCTCGTATCACCTCAGCTTATTATAGTCAGATTCAACGTGCGCTGGCTTATTTTGCCCTCG |
| | | ATAAAACCCGGTTAATAGACCTGTGTGATGAGCTGGGCTTGTTCAACCATCAAACGGGGCATGTCTTTCTCATCC |
| | | GCGAAATTTTCCTGAATAATCATCACATTCTGGGTGTCTATCGTGAATACCTTACGAAAAAGCAAAATTGGATA |
| | | GACCAAAACCTGATTGTGAAAATCCAGGAAAGAGGCAAGCGCCTGACAAAATATATCCTGCCCACCAATCGGC |
| | | CATTGCCCTATAAGATGAAGCAAAGCATAAACAAAGGTTTTGAATTCAATGCGTGGCTCCAGCACAAATCGACG |
| | | ATGCCTATTGATCTGCCCACTACCTTGTTTGACGAGAGCTTAACTAGTTTATTAAAAAAAACCATCGCTCAAAAA |
| | | TTAGGAATTGCCAGTAAAAGTGAGGACAAATTCGGGAGACTGTTGGACCGGTTATTGAAACAGGACACCCAAC |
| | | CTTTTTACAAGTTTGAACGCATCTATAGAAAACCCTTCTCTCAGGAAGAGCCGGAACCTTTCAATATTTTAAAGC |
| | | TGACACACACAGCGCTCAAACAGCGTTTCGGTAAGCCGGCCGAGGTAAACGAAAAGATAATTCGTCATCATCAG |
| | | CGCAAAGATCAGATTGTACGACTGATGTGCGAGCATCTGTTTAAAAATAACTCAGAACTTGCGTTTGAAGGGGA |
| | | GTTTTTACTTGAAAATCTTCATCCGGCATCTCGCAACAATCCGTTAGATGCACCTATGGTTTTCGAGCAAACGAT |
| | | TCCACATACCCATAAAAAGATTGTTGCACAGGATAGCAATAAGTGGATACAGGAAGTGAAGAAAACAAATAAT |
| | | CGTAACAAAGCCTGGTATCGATGGACACTGAAGGATTTTGGGACTTTTCGTAAAATTATTCACGATCGCCGGTTA |
| | | CCGGCACTGGTTAATAGTATTACAGGTGATGAAATTGATTTTGACTTGGTCCAGTTTGAATTGGCGGCCTATGAT |
| | | CGTGCCCGGGAAACGATATTTGACCAGCTCTTTTTGCTGGAACAGTTTATTGCGGATAAAGACATGAGTTATATC |
| | | AAGCAGCACAAAGCGATTGAAAGAATGCAAGATGGAAAAGGTTTTGATGAGGTGCAGTTCAACACATACGCCG |
| | | ATTGGCTTTCGGATAAAGGATTGCTGACTCCTGATGAGATTAATGGTTTAAAAGAAATCCGTAATCGTTTTTCTC |
| | | ACAATCAATGGCCGGGCATTTCCAAACTTGGCATTCAGCCGATATCCCAGGAACAACAGTCTGCATTTGTCACTC |
| | | ATCTCAATATAAAGGGTTGGGTGAATGAACATCATACACCACTGGCGATGTTTATGGAAAAACTTGTTATTAATT |
| | | GGGTTTCGAAAGCCATAACTTAA |
| 293 | JW13116 | ATGGGCGTCGAAAAAAATAAAGTCTTCGAAAGCGTGATAATGAACTTTGATCAAGAGCGAAAATATGGATTCAT |
| | | TGAGTACAAAGAGACAAATAATTTGTTTTTCCACATGGAAAACGTTAAAAATCCGAAGGAAATAGTGAAGGGC |
| | | GCTAAAGTGCGTTTCGAAATATATGAGAATCCTAAGCCCAAAAAACAGAATCAGCGTTTTAGCGCTATAAACGT |
| | | AGAGGTGATAACCGACGAAACTCACAAAGAGGCGAAGATTCAGAAAAATGAGTTTAAAACATTTGACCAGTTC |
| | | ACGAAAGAATTACAGGAAACTCAGAAAGTCAATGGTGAAACCAAAAAAGAACATATCACAAAAAACAAACAC |
| | | ACCAACGTTAAAGCGGCTGGTGTAAAGTCTGTTTTTGCCGTTGATGATGGGAATGTCTTAATTACGTCCTTTGGC |
| | | CGCGGAAATGCGGCCGATATCGAAACTTTAAAAAGCGATGATGATAAAACAATCAACCTCACAGAAACCGAAA |
| | | ACCAGAAAAAGTACGTCGTGACTAATAAACGTTCGAATGTAAAAGGTTTAGCTGATAATCCGACAAAAGTTGAA |
| | | AGCATCATTCCGGGCGAGACCCAAATTGGGTTTAAAAGTATTCTGGAAAAACACTTCTTTGGTCGGACGTTCAA |
| | | CGATAATATCCATATTCAGATTATCCATAACATTCTTGACATAAAGAAGATCCTCGCCGTCCATACGAATAATAT |
| | | AGTGTATGCACTCGACAATATTCACGAGCGTGGGAGAGAAAATTCGGCCGAAAAGCCAATCGATATGATAGGT |
| | | GCAGGGGGTATTTCGACAAGTAAAGAATATGAACAATATTGCTCCGAGAAGAGCGATTACGAAGATAATTTCCT |
| | | CAAACAGTTAATAAACAATGAACGCATTGCGTACTTTGGCAACGCGTTTTTTAAAGATGAAGGGAACAAAAAAG |
| | | TAATGCGTACCGAGAAAGAAATCTATTACATTCTGGGGATGCTTAATGAAGTGCGTAATGTTTCTACACATTTTA |
| | | CAGAAGAAGATAACCGAGATTGGGCAAAGGCTAATCTGTATAATCTGAGCAACCGATTAAAAGTGGGCTCAAA |
| | | GGAAGTGCTGAACCAGTTATACAAAGAGAAAATAGACAAGATAGATGCAAACGGGTTTGTAAACAAGGGCTGC |
| | | AAACGGGACTTTAGTATCCTGTTTAAGAGTCTGAATTTGACTACCGATAAAGATAAAGGTGAACTGGTAGTCGG |
| | | ATTTTACGATTTCAGCATACGCAAAAATTATAAGAACATTGGCTTTTCAATCAAAACGCTGCGTGAGTATATGCT |
| | | GAAAATTTCAAATTCTACGCTTTGTGCAGACACAATTTCCAATAATGCAATCCGCCCCAAGGCCTATAAACTTTA |
| | | TGACTTTATCATCTGGCACTATTACATGAATAAGCCTGATAAAATCAATGACTTTGTTGAGAAACTCAGAACCCA |
| | | AAACAAAAACGATGAGAAAATTAAACTTTATTATGACGAAGCGGTCTGTTTGCTGAGTGAGTTAGGACGTGAGA |
| | | TTCATACCATGACGAGTTGTGTGCATAACATCGAAAATACGAGTTATGAAATTACCGATAAAAAGCAGAAAGAA |
| | | TACTACAAAATGCAGATAAACAGCCTGAACTCTGCCGATAAAGTATCCGATTTTTCAAAAGTGATCTATCTTGTA |
| | | ACATTATTTCTGGACGGAAAAGAGATTAACGATTTGCTGACGACACTGATTAATAAGTTCGACAACATCGCAAG |
| | | TCTGCTTTCCGTGTTAGAAAAACAAAGCGGAAAGAAAGTTGAGTTTGTTGAAAATTATTCGTTCTTCAATAGTTC |
| | | GAACTTGCTGAAGGAGAAAACTTTAAACAAATCCGAAAACTATACTTGCAAGATTGTTGAAGAATTACGTGAAA |
| | | TCAATAGTTTTGCACGCATGACAGGCGACTGTAAAATCCGGAAATCAGCTTTTGAAGATGCCAGCCAGCTGCTC |
| | | GGTTATCACGATAAAACTGTTAATAACTTGTTTGAAGTACTGCGGCTGAAAGAACTTGAGAGCAAAGACTGGAA |
| | | AAAGAGAACGGATGACGAACAACAGGAATATGATCGTCTGTTAAACAAACACCATTACTTCAAATCCGGAAAA |
| | | AAACTTCCTGATACCGGTCTGCGCAACTTCATTATTAACAACGTGATTGAATCACGCCGCTTCAATTACATTGTG |
| | | CGTTATGCGGACCCGAAAAAAATACGCAAATGCACTGAGAACAATGAGCTCTTGAAATTTGCCTTTAAAGATGT |
| | | CCCGGATTCTCAAGTTGACAGATATTACAATATTTGCGTTACCAATAAAATTACGAATGCTACCCGCGAAGAGA |
| | | AAATTGAACGTCTGGTGGACATCATTAAGAGTATGAATCTGTCCAAGGTGGCAACAGTAAAACAGCGGGATAA |
| | | GCAAGACAATGTAGAAAAGCAGAAACAACTTGCGATTATGTCGCTCTATCTGAATATCCTCTACCAGATAGCAA |
| | | AAAACCTGGTTTATGTTAATTCTCGCTATGTTATGGCGTTCCATTCACTGGAACGAGACTCTCAAATGTTGTTTG |
| | | ATGCCTATTATGATGTAAAACGCGGTTATTGCGATCTGTCAACCGTGCTGCTGTTTGGCGTCGATGATCTGCAGA |
| | | ATAGAAATCGTGGCTCCTATAAGTATTTGAGAGATAACCGGCGGAGCAATAAAGATGTGATAGAAACCTTCGGT |
| | | GACTTTAAAGGAAAAGTTTCAAAGGTTGTTGAGAAGAAAAATCAAGGCTTAACGAATGAAATCTATGACTCGTT |
| | | ATGTAATGTCGCGGGCACTACCAAGACTGAGGTCCAGAACGAAATTAAAAGCATTTTAAAAAGTAATGGTTTGG |
| | | ACGAATCGGCATCTTCTTATCTGAGCCATAAACTTGTTAACAAGGTTCATTCTTACAAATACCTTAAACAAAACC |
| | | TTGATTGTGCGGATAATACTATGATTAACCAATTTCGAAACAACGTTGCTCATCTGAATACAATTCGTAATATGG |
| | | ATGGTATTGAGAATGTCACCGGTATTACCTCTTATTTCCAGATCTACCATTATCTTATGCAGAAAGCCTTGTATA |
| | | AAGAGTTTAAAAAGTGTAGAGAAAATGCCGTGCGTAAGTGGATCCCGTACATAACTGAAAATGCCGAACCTAA |
| | | GTATGTATATTGGAACAAGAAAGAGCAGCAGGAAGTTGAGGTGTCCTTCAATCCAAAGATTTTCGGGTATATGG |
| | | AAAATATCAAAAATCATTCAAACACCTACTGCAAAGATTTTGTCAAAGCATTGTGTGCTCCATTTGCTTACAATC |
| | | TTCCCCGCTTCAAAAATCTTTCAATTGAAGAGCTGTTTGATATGCACGAGCTTTCAGAAGAACCAAAAGAGTCTA |
| | | TGAAGTTAACGGACTAA |
| 294 | JW13117 | ATGGAAAAATCCAAGTTAGATAACGAGATGACGTTTGCAGAAGATGCATACTACTTTGCACATTACGCCAATAT |
| | | GGCCCGCCACAATGCGTATTTGATTCTTAATCATATTAATAAAAGCATTTTCGGGAATGAGTCAACTCTGAAAGA |
| | | AGAAAATCTTCAAATCGCGATTATCAAAATTCTTGATCCTAAAAATGGTGCTGATCATCATGCTAAAGCGATTA |
| | | AACTGTTAAACCATCACTTCCCATTCATCGCCTGCTATTATAAAGAAGATATTAAGAAAGCCGTTGAGAATAGT |
| | | GCCTATAAAGAAATGAACGATAAGAAGTTAGACCATCTTAAAGAACCCCTCACCTTGAAACAGATTTTAAAAAC |
| | | GTTAACCGGGATCCGTAATGAATTAAACCATTACGGATATAGTCGCAAAGAACACCCCATCCCTTTTTTTCAGGA |
| | | TCTGTTTAATGACAGCATACAGCTGGCGAAAAAACGTATGATTGAATTCAATGAAACCCGGTTTAATTCCATCC |
| | | AGGATTCACCTTACCATAAAATGGTCGATCCGAAAGACTCGGTTTTAACAGATACAGGCAAACTGTTTTTCTTAT |
| | | GCCTGTTTCTGGATAAAAAAAATGCCTTTGAAATGCTGGCTAAAGTCAAGGGATTCAAGAATCGAACAGACGAG |
| | | AAATATAGAGCAACCCTCGAATGTTATACCCAACTGTGTTGCAAAACACCGTACCCGAAACTCGAAAGCTCCGA |
| | | TATTTCTCTGGATATCCTCAACGAATTAAACCGTTGCCCGAATGCACTCTACCAAGTACTGAGTGAAGAAGATA |
| | | AACTGAAATTCAAAAAAGAACCCAACGAAGAAACAGCGGAAGAGCTGAACCCGATTATGAAACGGTATGACGA |
| | | TCGATCGGCATATCTCGCACTTCGTTACTTTGATAGAACGAAATGTCTGGATAATATTACGTTTCATCTCCAATT |
| | | AGGGCGTAAAGTTATGGGCGAACCTCATAAGAAGGTTTTTGATGGTAAAGAACGTACCCATCAGATTCTCAAAG |
| | | AGATGCGCGTTCACGATAAACTTTCCACTTATGAAACAGAAGAAGCCCAAACATTCTTTCAATCAAAAATTGAA |
| | | TCAAATGAAGTAGAACTCTTTGCCCCACACTACCGCATGGTGGGTAATCGTATAGGCTTGTCTTTTGGTACGCCA |
| | | TCAGAAAAAAAGGAAGGCTATAGTATTCCTATAAACAATCAGCCGGCACCTCAGGCAATCCTTAGTACCAGTGA |
| | | ACTGGGTGCACTGTATATCTATAACCGTCTGTATAAAGAGAACAAAATTACGCAATCTCCGAAAAATCTGATGT |
| | | CTACTTATCTCCAGACAATGAATAGATTCATCAAAGATTGGAAGAACGATGGTATCAAGCCGGAGACTAGCAGC |
| | | AACAAAATCATTAAAGAACGAAATCAGGAACGCACAAAGCAGACGATTAATGAACTGAAACGTCGGACAGACC |
| | | ATCTTCAAAAACTGCTGGATGAGAAATATGCGGGATTAAAAGTCAAGCACCTTCCGGATATTTGCAGAGAACAT |
| | | CTCCTGAATTATCAATCGGACGATAATATTCAGCAGGCGATCGACTTTCTTAAAAAAACACTCTCTGACACGAAT |
| | | TTCAAAAAGAAACAATTGGAACAGTTTGAGCGTAACATGGTTTACCGCAGCTCGAATTCAAAACAGCTCAAAAT |
| | | AGGCGAGATTGCGCAGGAATTGGCCCGGGACATCGTTTTCTTTCTCAAACCAATAAAGAAAGAGATCACCAATC |
| | | GAAACAAAGAGAAAGTCACTGTTTTTCAGAAAATAAACAATCAAGACTTTGACATTTTGCAGAACCGCTTGGCT |
| | | TATTTTTCACTTTACAAAGAGGAACTGTGTTCTTTTTTTGATGATCTTTTGAAAAAGAAACACATGAAACACCCT |
| | | TTTTTGGAAAATGTAAAAGCAGAAACCAAATGGTCCAATGGCCTGATAGAATTTTATTTGAAATACCTGGAGCA |
| | | TAAACTGAAGTGGTTGAATACGTATACCAAGAATGCTCCAAATAACACCACTCGACCAAATTATACGACTTCAA |
| | | ATCGCATAAACAAAAACCGCAGCACTCCAAATAAGAAGGATGAGATAGAAGAAAAGGAGATCGATCCGGAGA |
| | | AAATAAAAGAGACATTCATCGAAAAATACAACTATTTCTTGAAGGTGAAAACCAGTTCTCCCAAAAACTATCAG |
| | | GGTAAAGCGATTTTTATTCCGGTGGGGTTATTCAACGATGCCATCACCAAAGCCATGAAAGAGAGTGGTTATCA |
| | | GGTGGAAGATGACGAGAAGACTCCCAATGCTGCTTATTGGATTAAGAGTTATTTTCATGGAGCTACCCAGCCCT |
| | | TTTATCAACTGCCTCGCTACTATAATCGGGCTAAGAAAGATGAAGAGCGCGACCTGGTAGAAGCTGCGTTACTT |
| | | AAAAAAGAGATAAAGAATTACTATGTGAAGGCAAACAAAAAGACACAGAACGACTTCAAACAGCTGGCAAAA |
| | | AGAATCAGAAAGCAAGAGGAAGAGATTCTGACTCAGCAGACCTCGGATCGCGTACTGTTTATGATGGCGACGG |
| | | ACCTGCTGAACGGTGGAAGCGACGGCCGTCAGACGATTGAGTGTGAACAGATAAACACATTAGGATTCAACTTA |
| | | GGTGAAAACAAGATTCTGGATGAGAATCGTAAAGTGTCCATGAATATCTACGGGCGGAAAGTCGTTTCCGAACT |
| | | TCCAATTAAACGTTACGGTGAATTCAGACGGTTTATGAAAGACCGTCGCCTGGAGAACCTGATTAACTATTTCCC |
| | | TGAAGGCAAGGACATTGAACTTGGGGTGCTTAAAAGTGGTGAGGTGGAAGCTGTAGGCGAGCGCTTTTCAAGCT |
| | | CAACTTTAGCCAATGAACTCGAATTTTTTGATAGCCAGCGTTGGCTGTTAATGAAGTCTATATACGAATTTGAAA |
| | | AGAAGATCTATACCCATTTCTTCGATGTTCTGACTAAAAATGTGCCGGAAAAAGAGATGATGGAAAATAACTAT |
| | | ATCGCGCATTATCACTATATAGAGTGTGCCAAGAAGCTGGAACTGTCTGTCTCTGAGTTGGAAAAAGATGATTTT |
| | | AAAGAGTTACGTAACAAGATACAGCACAATGAGATTCCGTACTCCCAGTGGATTAAGAATCGCATATCGACCAA |
| | | AGATGGCCATCTGATTACCAAACAAATCGTGGAGTTAGTTTTGAGCATCTATCAGCAAATGAATAACGAACTTG |
| | | ACCAATTAATTCGGAAATAA |
| 295 | JW13118 | ATGAACCATACGATAGGTAAAGGAATTTCTTATAATCCGTTTAAACACCAAGACAAACACTACTTTGGTAGCTT |
| | | CTTTAATCTTGCGGATAACAATATTAAAGATGTATTCAACGAAATTGCACAACGCCTGAATCATAAAGACTCAA |
| | | ACCCTAAAAACATTATTAACCATTACACTGACAAAAACATTTCGCTTGTTGATTTCGAGAAGTTTGTTAGTTTGC |
| | | TGTCCAATTATTTCCCGATTGTGAACGAAATTGACCAGATTAATTGTGACGCCAAAGGTAGTAATGGTAATTATA |
| | | AGCCTAAAACGAAAGAAGAGCGCCTGGGCTACTTCAAAAAAACTAGCTATTCATTACTTGAGGCTATTGATAAA |
| | | CTGCGCAATTACTATACCCATTATCACCATGAACCGATTGAAATTGATCTGAACCTGTTTCCATTTTTAGACCAT |
| | | GTGCTGCTCAAAACGGCTTTAAACACTAAAAAAAATTATCTCAAAAAGGGCAAGACTAAAGAGCTGATTAAAG |
| | | ATAATCTGAAGCAGCAGTTCGATTTCATCTTCAACATTAAAGTCGAGGAATATTTGAAAGAAAAAAACCCGACT |
| | | TCGAAAAAAATTGAACGTGCTGGCGGGAAAATAGAGAATTTTAACAAAAGCCTCGTTGAAGAAATAACATCTG |
| | | CAATCTACAATGATGCGATAAAAGATTTTATCTATTCCAAAGGTGAAAATGCAGAACTTTCCAACCGAAAAAAA |
| | | ACATCGTTTAGCGACAAGGATTATTTCTACTATAATGATGATGACCACTTCAGTTTACCTATTTCTTCAAGCGGG |
| | | ATTGTTTTTTTATTGTCATGTTTTCTCAATCGTAAGGAAATCGAAAGTCTGAAAGACAATATAACTGGCTATAAA |
| | | GGTAAGATTCCAAACAGTGAACTGACATTGAAACATAATGGTATTCGTTTTATGACCACTCACCGCATCTATTCT |
| | | CATTGGTGCTACAAAGGTCTGAAAACGAAAATCAGAACCTCAGAAAAGGCCACACGTGAAACTTTATTGCTCCA |
| | | GATGGTCGATGAGCTCAGCAAAGTGCCTGACGTCGTATATCAGAACATAAGTGATGACTTAAAGAAGACCTTCA |
| | | TCAAGGATCTGAACGAATATTACATAGATAATCAAGAGAACCAAGAGAATCTTTACAACTCAAAAGTGGTTCAT |
| | | CCGGTCATTCGTAAACGGTATGAAGATAAGTTCAATTACTTCGCGGTACGTTTTCTGGATGAGTTTTTAGATTTT |
| | | CCTACGTTGCGGTTTCAGGTGCATCTGGGCAATTACCTGGAACATTCTACGTCAAAAAACATTGGAAACTCGAA |
| | | AACCAATAGAGAGATAAAAAAGAAGATTTTTGTCTTTGGGAAACTCAGTGAGGTGAACAAGTTAAAAAATGAT |
| | | TTCTTTGAGAAGAATAAGCAAAATGATACCAGCTGGCAGTTTTTTCCAAATCCATCGTATCATTTCCCCATGGAA |
| | | AACAGTAATGACTTAAAAAAAGCCAATAAGATCGGAATCTACATTAACCATGATAAGTCTATTAATAAGTTCAA |
| | | ACATCAGACGCAGAAACAAACACATGAAAACAAAATCAAACTGATCCAAAAGGTGATCGGTGATAAGTCGAAA |
| | | ATCAAAATTGGTCAACCGATTGCATATCTCAGTATGAATGATATCCACTCCATCCTTTTTGAAGCCTTAAAGAAT |
| | | CCGAAAATTAAGGAATCTGGGAAAATCGACGGGGAGCACATTGAGTATAAGATAACCCATCAGATCAATAAGC |
| | | AGATTAAAGAGATACAAAACAAAAACGAGAATGCAAAAATCATAAAGAACCAGCAGTCAAAACAGGAGACAG |
| | | ACTTTAACATCGATAAGCTGATCAAAGATGTTAACAAGGAAATCACAATTAGCGAGGACAAAATCCAGACATTG |
| | | AAAGAAAATAAAAAGCAGTATCAGAATTACCAGCGCAGCAAAAAATCCGAAAAACACAACAATTCCAGAAAA |
| | | CGCAACCACATCCTCTATAATTCTGAAAAAGGAGAAATTGCGACTTGGCTTGCGAACGACATCAAACGTTTTTTT |
| | | TCAAAAGATTTTAAAGATAAGTGGAAAGGACATCACCATAGTAATTTTCAGCGAAATCTTGCTTATTACAATAC |
| | | CCAAAAAAAAGAAGTTGAATTGCTTCTGAAAGGCTTGGATTATCGCAAAACCATACCCATGCTGGACTTCTCTA |
| | | AGAATTCGTTTCTGGATTTCTATAGAAAGTATCTGGAAAAACGTAAGCAGTATTTTAAGAATTTGTTGAGTGAAC |
| | | TTAAGAATCACAAAAGCGGCAAACACGATAGTATTGAAAAGCTTAAGAAAAAATGTTTCACGCACTTCAAAAA |
| | | GCGGAATTATCGAAACAAAACCATCGAAGATAAAATACAGAACATGTTAGCCAATCCCATTTTTATTAAACGTG |
| | | GCTTTATGGATACTAAACCCACAATGATACCAGGCAAGAATTTTAATCAAAATAAAAGCGATTTTGCTGATTGG |
| | | TTCGTTGCGTTTAAAGAATTTTCGGAATACCAAAAGTTTTATGATACCAATCTTTATCCGATTGATCTGAGCCAG |
| | | AAATCAAAATCTGCGACGAAAAAGATCAACACTGAAATATACAAACAGAAAAAAAATGATTGGGCAATTTGGC |
| | | AGATGACGAAGTATATTTTCAAAGACATATTTCAGCAAGACTCCCAAAACATTTCCCTGTCTGAAATATACCAG |
| | | AGTAGACAGGAACCGATATCAAATGCCAAAAACACAGCCACGGACAAACGCAAACAGAATAGCATTTGGGACA |
| | | GCACAATTGATCTTCAGCTGAATCGGAAGATTAAAATTTCCGATGTAAAGCTGAAAGATATTGGCAACTTCCGG |
| | | AAATATGAGAATGATCAGCGTATCAACACCTTTTTAGACTATGGAGATTTTTCCGATTGGATGGCCTATCTTCCC |
| | | AATAATTGGCAGGAAAACTTTGAATATAAACCGATCAACGTCATTGATATTCAGTTAGACGATTATGAGAAAAT |
| | | ACGGCAAAATGTTTTATTGCAAGAGGTGCAAAATCTTGAACGTGAGATCTACAACAATGTATCAAATAAAAACG |
| | | AAATTTTAGTGCAGGACAGCAAAGGGAATAAAAACCCTAATTTTAAAGCGTACATCTTAAAGGGTTTACTGAAA |
| | | CAAATCAAAAATCTGGACATCACAAACTTTAAACTGCCACAGAATGCAAAAGAATTTGATACACTGACCTTCAA |
| | | ACATCTCCAGACACTGTCTGTAATAGAGCAAAAAACGACCTTGCTGATACTGCTGCGCAATAAGTTTGCACATA |
| | | ACCAGCTGCCTAATAAAGCAGCTTATGAATTTTGCCAAACTATTTTAGAGCGAGAAAAATCTCAGACCTATGCT |
| | | CATTACTATTCAGAGTTATTCAAAACCCTGAAAAAAGAGCTGACCGACATTTGA |
| 296 | JW13119 | ATGATGGAGACCATTAAACAGGAAATTGGCAAAGAATACAATCCGTTTAAAACAGAAGACAAACACTATTTCG |
| | | GTGGGTTCTTTAACCTGGCGGATAATAATATCAAAGAAGCTTTCAACGAAGTTAGTATACGACTGTCCCAAAAA |
| | | GGAGCATCGCCAAAAACCCTGATTGAAAAATATACAAAAGAAAACGTGTCCTTAGTGGACTATGAACGCTTCGT |
| | | CATTCTTCTCTCGGATTACTTCCCGATCATCAAAGAAATAGATCAAATCAATAAAGATGAGAAAGACAACAAAG |
| | | GCATTCTGATCCCTAAAACTAAGAATGACCGGATTAAAGATTTCGAGGTAATTTTGGTGTCAATGATCGATGCC |
| | | ATTGAAAATCTCAGAAACTATTACACACACTTTTATCATGAGTCAATCGAGATCGACAATAAAATGTTTTATTTT |
| | | CTTGATAAGGTCCTGTTCAAAACCGTTTTAGATACTAAGCGCAACTATCTTAAAGAGGATAAAACCAAGGAGAT |
| | | GATTAAAAACACGCTTAAGGAAGACTTCAATAAGATTTTTAACCTGAAAGTAGACGAGTATCTGACAAAAGACA |
| | | ATCTGACGTCAAAAAAAATAAAAAAGGCAAGAAAATACGGTAATAGTTTCGATATTGGTCTGACGAAAGAAAT |
| | | CACGGCATCAATCTATAACGACGCGATAAAATATTTCACATACGATAAAAACGAGAAGTCAATATTATCCGATT |
| | | CACGCAAAACGGCCTTTAACGAACGTGATTATTTTTATCGGGACAAAAATTTTGATCTCCCAATTTCTAGCAGCG |
| | | GAATTATATTTCTGCTGTCTTGTTTTTTGAACCGCAAAGAAATTGAGGACTTGAAATCTAACATCAAAGGCTATA |
| | | AAGGCAAGGTAACTAAAAACGAAGAGCCGACTTTAGAGAAAAATAGCATTCGTTTTATGACGACACATAGAAT |
| | | CTATTCTATTTGGCACTACAAAGGGCTCAAAAACAAGATTAAGACATCGGAAAGTGCGACGAAAGAAACTCTGC |
| | | TCATGCAGATGATTGATGAAGTAAGCAAAGTTCCCAATGTGGTGTATCAAAATCTTTCCAAAGATCTCAAAGAT |
| | | AGTTTTATCGAAGATTGGAACGAATATTACAAACACAACGAAGAAAATACCGAAAATACAATTAACTCGAAAG |
| | | TGATTCATTCCATTGTTCGCCGACGTTATAAAGACAAATTCAATTATTTTGCCATTCGTTTCCTGGATGAGTTTGT |
| | | TAATTTTCCTTCACTGCGTTTTCAGGTCTATCTTGGAAATTATCTGGTAGATTCCCGTCCCAAAGAAAGCGCAAA |
| | | TGTGATTACCGAGCGCGAAATAAAGAAGAAAATCTTTGTTTTTGGTAAACTTAACGAAGTGAACCAGTTAAAGA |
| | | ACGACTTTTTCAGCAAAATTGAAGAAGATAAACTGGAGACCAATTTGGAAGTTTTCCCGAATCCGAGTTATCAT |
| | | TTCCCGATGGAGAATAGTGAGGAATTGAAAAGTGCTAACAAAATCGGAATCTATCTTTCAGATATTGAGAATCT |
| | | GCTGGAACCCTTCAAAAAACACCTGAATAAGAATACTAGTCAAGAAAAGATATCGTTAATAGAGGATATCACG |
| | | CAACAGAATGAGAATATCAAAATTGGGCAGCCTTTGGCGTATCTGAGTATGAATGATATACATTCTGTCATTTTT |
| | | GAGGTGCTGAAAAACCCCATTATTAAAGATGGCAAGATTGATGGGAAAAGCGTTGAAAAGAAGATAAAAAACC |
| | | AGATCTACAAGCAAATCAATGAGATCAAGAACAAAAAGGAAGAATCCAAAATCATTAAAAACTTTCGCAAAAA |
| | | AACAGAAAGTGACCTTGACCTTAAAAAAATGATTGATGATCTGATCAAAGAAATTAAAATCACCGATGACAAG |
| | | ATTAAAAAGCTGGATGAAAACAAGAAGGAATATTTTGATTACCAGAAGAATAAAACCGCTAAAAAGCGGAATT |
| | | ACATCTTACAGAATTCTGAAAAAGGAGAAATAGCAACTTGGCTTGCCAATGATATAAAGCGCTTTTTTCCTAAA |
| | | GAATTCAAAGAAAAATGGAAAGGTTATCATCATCGTGAGTTACAGTTAAGCATTGCTTATTATGATACGCAAAA |
| | | ACAAAATGTCAAACTGCTGTTGTATGGTCTGGACTATAGAAAGGAAATCCCAATGCTGGATTTTTCTAAGCCTA |
| | | ATTTCCTGGATTTTTATGAGTATTACTTGAAAAAGCGGAAACCACAATTGTACAATCTTTTATCTGATCTTGAAA |
| | | AACTGGAAAGAGGCGAGTCCATTAACAAAGAGATGCTTCTCTCGAAATATTTTAAGCTCTTCCGTAAAAGTAAC |
| | | TACCAGAACAAATCATTGGATGATAAAATAAACACCGCGTTGGCAAATCCGATTTTTATTGAGCGTGGTTTTATG |
| | | GACGGTAATCCTACTGTTATTCCGAATACTACTATTAAAGGGAATGAAAGCCGTTTTGCCAATTGGTTCGTCGCC |
| | | TATAAACAGTTTGACGAATATCAAAAATTCTACAATACGGAAGAGTATTTCTTAGAGTTAAAGGACAAAACGCC |
| | | AAATGAAATAAAAAAGATACAGTCGCAGATCTACACACAGAAAAAAAACGATTGGGCCATCTGGAAAATGATC |
| | | AGCTACATTTTTAAAGACATTTTTAATCAGGATCTGCAGAACGTAAGCCTTTCAGAACTGTATCAGAATCGCGAG |
| | | CAGCGTTTGGAGAATGAAAAAAAATCAAAAGAAGGTGAGCGAAAACAAAACTTTTTTTGGAACAAAACCGTTG |
| | | ACCTGCAGCTTAACAATAAAATCAACATACCGGAAGTCAAGCTGAAAGATATTGGCAATTTTCGCAAATACGAA |
| | | AAGGACGAACGGATAAAGGTTTTTTTATCTTATAATGATATTACCGATTGGATGGCTTACTTACCAAATGACTGG |
| | | CAGGAAAAGCATACAATAAAGCCTATCAATGTAATTGATATACAGATTGATAAGTACGAGAAAATTCGACAGC |
| | | ATCATCTGCTCAAAGAGGTGCAAAATCTGGAAAGCGAAATCTATAATAAGGCGATTAACAAAGAAGAACTTCTC |
| | | CAGGAAGACATAAAGGGCAACAAAAATCCGAACTTCAAAAAGTATATCGTCAATGGATTACTGAAACAGATAA |
| | | AGGGCCTGAATGTTGAGAACTTTAAAATTCCGAATTCCGATAAAGAGTTTAACGCATTATCTGAAGAAACCCTT |
| | | AGATCTTACACAGAATTAGAACAAAAAGTGACCCTTTTGGTATTGATTAGAAATAAGTTTGCTCACAATCAGCT |
| | | GCCAAATAAGGATGTTTATGCGTTTACCCAAAGCATCCGGAAACGTCAGAAGAATGAAACTTATGCAGAATACT |
| | | ACTTCAACTTATTTGAGAAAATTCGCGGTGAGATATAA |
| 297 | JW13 | ATGGATACACCAAATTTCTCCGAACGTATACCTGTCAGTTTACAGAGCCACCCATATTATTTTGCACACTATCTG |
| | 120 | AATATGGCGCGGCACAATGCGTATGTGATCCTTGAATATGTGAACCGCGAACTTATTAAGCCAGGAAAAAACCT |
| | | GGACGAAGACAATCTTATTCAATCTACAGTACTCAAGGATGGCTACTTTGATCGTAAACCCGATGAGTTATCTCA |
| | | TCGTAACCGTTTATTGGTTCAGCATTTTCCGTTTCTGCGCGAAGCGGAAAATGAGGGTGCAAGAACCTGTAACCC |
| | | TGTTTCGTACAAATTAAAAACGGCTCTCGCTGCGCTTAACCAATGGCGAAATAATGCCAGCCATTACCCACTCA |
| | | ATCAAAACCATGAAAAGGATTTTGACCTTCAGCCTTTTTTTAGTTTTGCCATTGAAGCTTGTAAAAAACGAATGC |
| | | GCGAGGTGTTTCAACCCGATGATTTTTACCTGCTCGAAACTAATGAGAAACAATTTTACACCCTGCATAACGAG |
| | | AATGGTTTTACCGAAAAAGGACTTTACTGTTTCATCTGCTTTTTCCTGGAGAAGAAATATGCTTTTCAGTTTCTGG |
| | | CCGGGATCAAAGGATTCAAAAATACGACAGACAATAAGTTTCGGGCCACACTCGAGACCTTTACCGAACATTGC |
| | | TGTCGCCTGCCAAAACCAAAACTGGATAGTTCCGACATCAAGCTCGATATGCTGGGGGAGTTATCACGGTGCCC |
| | | GGCCCCATTGTTCGACTTACTGGATATAGAAGAGCGCAAGAAATTCATCCGTGAGCCGGAAGAAGTAAAACCG |
| | | GACGAATCAGGCGACCGGGAAGAAGTACAGCAGGTTTTAATGAAACGTTACGATGACCGTTTCCCCTATTTTGC |
| | | GCTCCGGTATTTCGAAGAGAAGAATCTGCTGAAAGGGATTAGCTTTCACATTCATATTGGCCGCTGGATAAAAA |
| | | GCGAACACACAAAGAAAATAATGGGCGCCGAACGCGACCGTCGTTTATTGAAAGACATCAGAACTTTTGGGGA |
| | | ACTGAAGGAATTTTCACCGGAGCATGCACCTGATTACTGGTTAAGAGATGGCATTACTCCTGATGATGTTGACC |
| | | AGTTTTCGCCCCAGTATCGCATTGTCGGGAACCGTATAGGTATAAAGCTTAATTACAATGGTCATAACCGTTGGT |
| | | CAGTGCCCGATAAAGAGATCAATGTAAAACCGGATGCAATTATCAGCACGTATGAGTTTTTAAACCTGTTCTTAT |
| | | ATGAACACCTTTATCAGAAGAAACTTACCGGCCTGTCCCCGGCAGAATTCATTCAGGATTATCTCGACCGTTTTA |
| | | ACAATTTTTTAAGTGAATTCAAAGCGGGTCATATACGCCCTGTCGGCGATTTTAGTCTTGAAAAAAGACGTGGG |
| | | CAGGGTGATGAGCCTGATCTGACTGCTCGCAGAAAAAGCCTGCAAAAAGAACTGGACCGTTTTGTTTTGAAAGG |
| | | AAAAGATCTGCCAGATAAAATTCGTGAGTATTTGCTGGGTTATAAACAAAAGAGTGAGAAAAAGCAGGCCAAA |
| | | TGGATTTTAGGCGGTATGATAAAAGAAACAGTCTATTGGCGTAACAAAGCAGAGCAGTCTCCTGAAAAGATGCG |
| | | TTCTGGCGATATGGCACAGCAGCTTGCGCGCGATATTATTTTCCTGACCCCGCCTCATACGGTTAAAGAACACAA |
| | | GCAAAAGCTGAATTCTTTGGAATACGATGTGCTGCAATATGCGCTGGCATATTTTTCTTCGAATCGTGAGAAGTT |
| | | ATATTCCTTCTTTAAAGAGCATCAATTAACTGTGAAGGGGGATCGGGCTCATCCGTTTCTGTATAAGATCCGCTT |
| | | GGATGAGTGCCAGGGAATACTGGATTTCTTTATTGTGTATATGCAGCAGAAAGAAAAATGGCTTGGTTGGCTTG |
| | | ACCGGAACCTGAAATCTCCGCGATTAAACGAAGAGGAATTCTTCAATACGTACTCCTATTTTATCAAAACTGAT |
| | | ACCAAACGGGCAATTGAGATGGATTATGAAAGCTGTCCGAATTATTTGCCACGGGGCATTTTTAATGAACCCAT |
| | | TGCTAAAGCCCTGCAAAAAGCCGGTGTGAAAATAAAAGATGAGGATAATGCATCGTATGCGCTTTCTGTATACA |
| | | GCAATGGCAAGACGCAGCCTTTCTATAACAAAGAGCGGTATTACAATAAAGGAATTTTCCGTATGGAAGAGTTG |
| | | CCGGAAAAATTGCAACCGAAAGAATTACTTGGCAAAATTCAGTGGACGATTAAAAGTTCCGGTAAAGATACGG |
| | | AAGAATTTCGCTCACTTCAGAATCTTAAAAACAGAATATTGAATACTGAAAAAGAGATCCGGTATGTGCAGAGT |
| | | ACCGATCGCGCCCTGTGGATCATGGTCGCTGATCTCTTCCCTGAAACATTCGAATTACGCCCGGACGATCTGGAA |
| | | TGCATCGGTCACGACCTGTCAGACGATCTCTTGTCGCGCCCGTACCAAATGAAAGAAAAAGTTTACAACTATAC |
| | | CATCACCGACTATCTGCCCATCAAAAGATATGGCGAATTTCGTAGATTTTTGAAAGACCGAAGACTGGAGAATC |
| | | TCCTGACGTATTTTGAGGAAGGTGTTCCATTGCATCGAGAAGCACTGGTTGCCGAGTTGGAAGCTTACGACCTGC |
| | | AACGCAAAAACCTGCTGGAAATAATCTATCGCTTCGAAAAACTGGTTTTCGATAGACACCGGCATGAGTTAACA |
| | | TTTTCAGGGGAAGGAGAAAATCAGTACGTCAACCACTGGGATTACCTGGACTTTGTTGCCCGAAAGTATGGATT |
| | | GAGCGCAGAGGTAAAGGAACTGAATTCAGAACGGTTTACTGAGTTGCGAAACAAGATGTTGCATAATCAGATTC |
| | | CGTATCAGTTATGGATTAAGGAAGCGATTGCTGCGCGTGAAGAGAACACCGTGTGTGGTCGTATTATGGGAATG |
| | | ATCGGTGAAATCTACGAACGCATGACAACAGAGATTGAAAAACAGATGCAGGTATAA |
| 298 | JW13121 | ATGTTTGATAACGAACAAAAGAATCTGGAAAAAGAACCTTACTGGGGAGTATTTCTGAATCAGGCACGTTTAAA |
| | | CGCCTATATTGCACTGCGCGATATTTCGGAACGATTGGAAGAAAACGCTGCCGATGAGGATAGCCTTAGTGAAT |
| | | GGCCGGTCTTGAAGTATCTTGACAATGATACAGATGCGGTCAAATCCCGCCGCATTTTTGATCTGGTGGAAAAG |
| | | CATTTCTCAATGCTCAAAATTATCTATGGCGGTGAGAAAGAAGGCGACCTTGTAAAACGTTCGAAAGAATATAA |
| | | GATAATATTAAAGTGCCTGTTTAGAGCGTTGAACTTTTATCGTAACAAATTTTGCCACATGTATTCAGGCAATAG |
| | | AGCTCGGAAGTATAATGAGAAAGAACTCATTAAGTATTTGGAAGATTGTTTTGACGCATCTGTGCGCAAAATCA |
| | | AAGAATTGCGTCGTTTGGATGAAAAAGATGTTTTACATCTTCGAAGAAAAATCGCGGAAGGCAAAGACGCGAA |
| | | CAAACGCGTTATCGATAATCCACAATTTCGTTATCCTTTCAAAAATGAGAAAGGAGAACTCAACGAAAAAGGGC |
| | | TTTATTTCCTTGCGTCTATTTTCCTGGACAAAAAAGAAGCCCATGAATTCTTAAAAAAGCAGGAATACTTTAAAA |
| | | ACGACAGCGAGCCTAAGTATCGGGCAACGTTAGAAAGTTTTTACCACTATAGAATAAAACTCCCACGTCCGGTT |
| | | ATCGAAAGTGACGTGGATAAAAATGGTCTTGCGTTAGACATGCTGAACGAGCTTAAAAAGTGTCCAAAAGAACT |
| | | GTTTGACCTGCTCTCTAAAGAACAGCAGGAAAAATTCCGCGTAGTGGATTCCGAAGACGCTGACGAAGAGGGC |
| | | AATGAAATCCTGATGCGCAGATATTCAGATCGTTTTCCTTATCTTGCGCTGCGTTATTGTGATGAGAATCAGGTG |
| | | TTCGAGAGAATTCGGTTTCAGATAGATCTCGGCCGATATTATTTCAAATTTTACCCAAAAGAAACTATAGATGGT |
| | | AAGACTCAACAACGTTCTCTGGACAAACGTCTGAAAATCTTCGGTCGTATCAAAGACGTGAAAAGCAAAGTCGA |
| | | GCAAGAATGGAGTGGTATAATAAAATCGCCCGATACCATTGAGGAGAATCCAAACGAGCCCTATAAGCTGAAA |
| | | ACCACGCCGCGTTATAACATTGTGGATAATCAGATCGGTTTTGTCATCACAGGCGACAAAAATCTTCCGGATGTC |
| | | AAACGACCCGATGGGAGAATTGAATTAGAAAAACCGGACGGTTGGCTGAGCATCTATGAATTACCTGGCATGTT |
| | | GTTTCACGGATTAAAATACGGTTTTGATAAAACAGAGAGAATGATAAAGATATACATCGAAAAACAACGGAAG |
| | | ATTTGTAAGGAAATTTGTGAAAAGGGGACAATTACACCGGATGATGGCGAATCCATGCCTGAAGCACTGAAAG |
| | | GTGGGGCAAAGGCTGCTAAACGCAACTACAGCGAGAAAAAACTCGAGCGGATGTTACAAGATACTGAACAGCG |
| | | AATCCGAGCCATTCAAACGACACAGAAACGGATGGACGAGCCAGGCAATAAGCCGGGTAAAAAAAAGTTTTTC |
| | | GATATCCGCGCAGGAAAATTAGCGGATTTTCTGGCACGCGACATTATGGCGCTGCAGAGATTCGACCCGGCCAA |
| | | ACACGGTAAAGATAAGCTCACCGCCATTAATTTTCAGGTCCTGCAGGCAACCCTTGCCTTTTACGGGGCAAAAA |
| | | AAGACGTTATCGAGGATATGTTTAAAGGTATTGGGCTGCTGGAAGGAGATAATCCCCATCCGTTTTTGAATCAG |
| | | ATTGATCCGGCTCAATATAATTCAATTGCAGGATTTTATCAGGCTTATTTGCAAAAGAAACGCTCATACCTGGAA |
| | | GATTACAGAAAAGAGGAAGAATACGACGAGCAGTTTTTACGTCCCAAACGTCAGCGTTATGCGCAAGAAAAAC |
| | | GCGAGATCAAAACCGTTGCACGTCAGCTGCTCGATAATCCTGTCAATGTACCCAAGAATTTTTTCAAAAAAGAG |
| | | ATTGAAGAGTTCGTTTTTAGCCAGGATCCGTCTCTGAAAAAATCCAAAATGAATACAGCCTATATGATCCAGGC |
| | | CTTGTTTGAAAAACATTACGGCCGCCAGCAGCCGTTCTACAGTTATAATCGCACCTATCCGGTGGTTTCAAAGGC |
| | | GATAGAGTACGGCAAAAAAGGGAAAAACAAAAAGATCGCCAAAGTACTTATGGCCATAGAGCCTAAACTGAAT |
| | | TATATGGAAATCAAAAAAATTGTAAACGAGATGCCAGACGGCCAATATGAGCCGGAAAACCTGAAAAGAAACC |
| | | TGTACGAGGGATACAAAGATTATGAGAAAGATGAGCGGATAATACGCCGTTGCAAAGTACAGGACGTGGTTAG |
| | | TTTTATGATGGTTGAAGAAACATTAAAAGATCAGCTTGATTTTAACGGAAACGTTCTGACGCTGGAAAAAATAA |
| | | CCCCGTGGGAAGCCAGCCCATTCAAAAAGCCTGTTTTATGCCATACGATTATCTCCATTCCATTCAACACCAAAG |
| | | GGGGTCATACTGACAAGGATTATGTTGATTTTATCAAGAATAATTTTGAGGGAAGCTACGATTGCGAACCAAAT |
| | | AAAATCATTCTGAAGTACAAAGTGACGTCAAAAGATACGAAATTAAAAGATATCGGCAAATATCGGATGTATTC |
| | | GCACGACCGGCGGCTGCCCGGTCTGTTAATATGGAAATATCGCCCTAACGATCAGAATGGAAACGAAATTAAGT |
| | | TCACTGAAATTGAACAGGAGATTAAGGCTTTTGAACGGCGCCGAATTGAAATTGCTCAATGTTTGTATACGCTTG |
| | | AGAAGAAGGTGATTGATTCCTGGTTCACTCAAGACGAGCTTGGTGAAGAACATATTCCCTTCAATAAGGTAATA |
| | | GACGTGATTAAGGCTAAAATGCCGAATTTCGAGGATAAGTGCAACGTTCTGTTGAAAATCCGTAACGCCATTAA |
| | | TCATAATCAGTTTCCGGTCTATGAACAGGCGATTCAAACCGCACCAGGTAAGGAAATTGCGGGTAAGATGCTGC |
| | | GTATAACCGAAAGTTACATTGAACAGATTATGGCAAAAATCGATCCTGATTTTGGGCGTACTGAAGATGCTGAG |
| | | TCTTCTCGCTAA |
| 299 | JW13122 | ATGCCAACGACGAACAATCAGAAAAAGAAAGCAGATTCTATCAAACGAACGAGCCCTTCCCCGTCGCGCATTA |
| | | ATGGGGTAGCGAAACCGCGCCCCCTGGTAGTTGATGAAAATAACAAACATGTGCTCGGGGGTTATTTTGGCCTC |
| | | GGCTTAAACAATTTCTACAAGGCTACCCTTTCGATATTCGCGCGCACCGGTATCAAGATAGCCTCAAAAAATGG |
| | | TACAGTTCTTTATCCAGAAGAAAAAATAGGGCAAGTTATACGCGTGTTACGCCGTAGCATTTCTGACACTTCCGG |
| | | CAATCTTACCCACGAAGAAAAAGTGTGGTCAAATGCCTTTAAGCTTTCATCAAGCCAGGAGATGCGCCTGCAGA |
| | | AGCTGATTTTCCATCACTTTCCAATTCTGGGTCCAATCATGGCGGACGAAGGTGCTTATAAAGCCTCTACTAATA |
| | | AAAAAAGTAAGGTTACCGACGCGTATAGTATGACCTATGGTGTAACACTTGAAGAGTGCCTGGATGTTTTAGGC |
| | | GACCTTGCACAGACGTTGGTCGATTGTCGGAATAGCTACACTCATTTTTACCCGTATAACAGTAAAGAGAGCAC |
| | | AGCAGACCAGTTGGCATTACAGTCCAAAACCGCTCGTTACCTGGATAAAGTCTTTACCGCTTCCCGTCGGCTCGA |
| | | CAAAGACCGTAACAATATCGACACGGCTATGATGGAATTCATCACCGGCTCAGCTAGAAACCTGCGTCAATATG |
| | | TTGAACGATATGGTTTTTATCCTAAGTATGACGAAACGGTTACCTACGAAAAGGATACTCGGGGCCGTGAACGG |
| | | ATGAAAAAAAAGATGACAGAACGTGATGATTTCTTTTACAAAATCGGTAACGAGAAGGAGTGTGACGGTAAGC |
| | | GCTACACGGTATTAAGCGGATTCGGCTTGAGTTTTTTTTGCGCCGTGTTCCTGTCAAAAACACAGACGCGTAATA |
| | | TGTTGGCTGATATTCGCTTATTCGAAACATCACCGTATCCCAAAGAATTAGACGATATCATTCGCGATATGATGA |
| | | GTATCTATAGAATTCGCGCTCCACGCGGTAAAAAAAAGCTTGAAGCGGGGAATACTGGTGTAACTTTGGCCTTA |
| | | GATATTCTGAACGAACTGCGCCGCTGCCCACGCGAACTGTATGATGTGTTAACAACTGAGGGGCGCAAGTTTTT |
| | | TGAAGATGAAACCGATCGAACTAAAGATGCGTTTGTTCCGGATGATGCACTGTCCCCGTATACCAGCGCCGACA |
| | | ATGCAAGCGAGACCGTTAAACGTATTCGTTGGACCGACCGATTTCCACAACTGGTGATGAAATATGTCGATGAG |
| | | ACAGAATTCTTCAAAAATATCCGTTTCCAGGTCCGTCTGGGGAAGTATCGGTTTAAGTTTTACGACAAACTTTGT |
| | | ATTAATGGCGAAGAAGATCTGCGAGGGCTGCAGAAAGAAATTAACGGATTTGGGCGCATTCAGGAGATGGAAA |
| | | GTGCCCGTAAAGAAAAATATGGCGACATGATGCAGCCAGTTGAAAGCGAAAGAATTCGCATTGATGATGACCTT |
| | | GAACTCGATCTTCTGCAATTTGCGGAAGATTCTCGTGATTCTTCACCGTATATTACAGATTCTCGAACCGCGTAT |
| | | AATATAAACAATAACCGGATAGGCCTGTATTGGAATGAATTGACGGTGAACGGACGGACAATCCCGAAACCGG |
| | | GTGACCATCTGCCCGACCTTGGCCTGACGCCTGAAGGGAAAGCGGATGTCGATATGCCGGCCCCTATGGCTATG |
| | | CTCAGTTTACATGAACTGCCCGCCATGGTCTTCTATCAGTATCTGTTATCGCAGAATGCAGACCCCAATGAGCTG |
| | | AAGACTCGTTCCGCTGAAAACCTGATTATTGGCAAGTTTAATTCCTTGCGCCGTTTATTCACGGATATTAGTGAA |
| | | GGGCGATTAGCACCCTTACCAGAGGATGGATTAGTGCGAGTTTTAGACGATCGTTATGGCCTCACTCTGAGAGA |
| | | AATTCCGGATAAACTCACAGACTTTCTCACCGGTAAAAAAGGTGCAGATCAATCTAAGCGTAGACGTGTGGTGG |
| | | CTGAACGTACACTGCTGGAATCTCTGCGTAAAGCAATCCGTCGTAGAGATCGTTATGAGGAAGACAGAAAGAA |
| | | GATTGGAGAAAAAGATAATAAGTATGCCAAAAAAGCTTACTCCGATGTACGCCATGGTTCATTAGGACGATACC |
| | | TTTCAGAATCCCTCATCGAGTGGCAACCTACTTTGGAAGGTGGAAAAGACAAACTGACGGGTATGAATTTTAAT |
| | | AAACTTCAGGCAGAGCTGGCGACCTTTAATAGTCCTGAAAAATATACCCGGCTGCGAGAGACTTTATCGGCAGC |
| | | GGGGATGTTGTCAGGCCCAATTGCACATCCTTTCTTACGCAACGTTACTAATCGTAAGATCCGGAACATTGAAG |
| | | AGTTGTATCTTATCTATCTTGATCAGGAGATAGGATATCTTAAGACCCTGCTCAACCTCGGATACAAAGGCGGTA |
| | | GACGTGATGATCGCAACATTGATTTTGAGGCATCGACCCTGAAAACTCATGTTGATGTGCGTAAACTTCCCTTAG |
| | | TGAAGGGAGAGAAACGCTGGGAAAAACGCACGCCTGATTATTGTCGTGAATTAGCGAAACGTTATCTTGAGGTT |
| | | GACGGAAGACGTACCTCTATTTGGTTGCCGGAAGGTATTTTTAGTAAAGCAATAACAGACCTTCTGACGCGCCA |
| | | CTACTCTGGTAACGATGGCCTCATGGACCGCATGCGAGATGACTCACTCAACAATAACGTCGCCTATCTGATTA |
| | | ACGCATTTTTCGAAACTGTCTTGGATGATCACTCGCAACCATTCTACATGTCCTACGATATAGATAAAAACAGCG |
| | | GAAAAGAAACACCGAATCGTTTCGCAAGAGTGTATGATCTTTTTGATATATTGAACAATCGGAAGATCAGAAAT |
| | | GCGCTGGTGAAAGTCCCTATGACCTGTAATCAGATCGCGGAGCGGTTTACTGCAAAAAATCGTGACGGTCGCAA |
| | | ACGAATCTTAGCTGAGATTGATGATCGTACCGCGGGAATGACCCCTAGAGATATCGGTTCACATGCCAGTCTGA |
| | | AAGAGGCCAAAGAGGCTATGCGTCGCAGACTGACCCACATGATCGGGGATGTGAAAGATAATGAACGTTGTGT |
| | | ACGGCGCTATAAGACACAGGACATGATTTTATTCCTGATGGCGAGCCAACTGTTAGGGGATGCTATACGCATGG |
| | | AAAAAATTGACAGTTTAGACAAGTTTCGCCTGAGTGCTGTCTGCAATGCAGGCTTTCTGAACCAAACGATGGAT |
| | | TTTGAGTTTCCGGTTCAGATGGATGGCAATGTAATCTACATCAGACAGGACAATATGAGCTTGAAAAACTACGG |
| | | AGAGTTTTACCAATTATTAAGCGACGATCGTCTGCCGTCACTGTTAGAGAAACTGGCCGATGGCGGCTCTGATC |
| | | GGATAGATTATGGTAACCTTATGGGTGAACTGACCAGCTATGACCTGCATCGGAGCCGTATATTCAAAGCCGTT |
| | | CACATGCTGGAGCGGCGCGTAACGAGTGACCGGCAGTTCAGAATATTTCTTAACAATCCGTGCGATCGTAGATT |
| | | TTACATCAATGACGATGCGTCTCGGATGGCGAAACGCAATAATTTTCGGTCTCTGTTGATGTTGTTAGAGCAGAG |
| | | CGATACTGCCTCTCTGACGGAGTCGGAACGTAACTTGATTATCTCCATACGTAATGCATTTTCGCACAACCATTA |
| | | CTCGATTGATCTGCCGCGTATTGCCCCCGAGAAACGGTTAAGAAAAACTACATTACTGAATAAAGATACACGTC |
| | | CTCTGGGCGAAAAAAAGGCCTCTTTGACAACAATTGCCACACTGATTGCTGCGCGGCTCGAAGAGCTCCAAAAA |
| | | AAATTGGAATCAAAACATTAA |
| 300 | JW13123 | ATGAATTTCGAGGAGAACGGAAATAAGTATCTGTTTGGGGCATTCCTGAATACTGCGTATGATAATTACAACGA |
| | | AGTGATAAGTCATATCTATGATGTCATTCGGAGAATCACAAGTAACAACCCGACCGAACAGATAAGCTCTTCAC |
| | | AGGCGCTGGTATCCGCAGAAGAGCAAACCTCTTCCGACGAGAAGGATAAAAACAAAGAACGTATGTCTTTTGTG |
| | | TGCACGTTTTTGATAACAGGCAATGCCACTTCACGGAAAATAGAGTCTATGCTGAAACGGGCCTTCCCTTTCTGG |
| | | GACGATTTGATTGAGATTCAGACTTCCATGTCTATGCAGCTGGATAAAACCGAAAGCATCTTTCAAGTTCAAAA |
| | | AAATTGTGTGGAAGAACTGTTCACAGCGCTCGAAAGTTGGAGAAACTATACGACTCACTACATTCACCCGGAAG |
| | | CAATCGCCTCTCCAACAATTAACCTCTTGCTGAAAAGTTGTTTTAATCAGGGTATAAAGGAGATAAAGAAACGT |
| | | TTTAACGCTCAGGATGAACAACTCAAGCATCTGTATGAAGCGGAGTTTTCTTATAATAGAGAAACAAATAAAGA |
| | | CGAGGTGAAATGTTACCATCCCGCCAACTACTATAAGTTTACTGACGAAAGCGATCTGTTGACTGATAAAGGCT |
| | | TAGCTTTCTTCACCTGTCTGTTTCTTTATAAACGTGAATCTTACCTTTTGCTTAACCAATTAAAAGGCTTTAAACG |
| | | GGCTGATGAAGAGCGTTACCGTATGACACTCGAGGCCTTTACCGTAATGCGGTTTCATGCGCCGAAACAGCTGA |
| | | TGAAACTGCAGCAACAACAAATTGATAAAGTTTCGCTGGGAATTAGTATGATCAATGAATTGGTGAAATGTCCG |
| | | AAAGAACTGTACGACTGCATTGAGGACGAGCAGAAGAAACAGTTTGAAGTTTATCCGAATGCCGAGACCGTAC |
| | | CGGATGAACAGGAAGCTATAGGAGAACTGATCCGTTATAAAGATCGTTACGAAATTCTTATGCTCAAAGCACTG |
| | | GAACACTCATCAGAGTGTAAAAACATGGGGTTCTATCTTAGTTTAGGTAAGTGCTACATGAAATGCTATGAGAA |
| | | GCATTACATTGATGGGACCACCGACAACCGCTATATCGTGCATCCGTTGTATGGGTTTGGCCGCCTGCAAAATGC |
| | | TTCGACGGATCATAAAAACCATCTGTCCTCATTCGGTGAAGAACTTCAGACGCATAGCCAGTTGCCTGTATGCCA |
| | | CTTCGCAACCGAGGACGATGCAGCTGATAGCCCTACAAGTGTTCCCTATATTAGCGAATCCTATCCGTCTTATGT |
| | | TCTCAATAATAATAATATCGGCATTAAGTGGCTTAATTCTTCGGAAAAGACAGAATATCCCAATTTTAACCTCAA |
| | | TGAAGGTAAAGTCTCGTGCCCTACGCCTGATTATTGGTTGAGCAAATATGAGCTGCCGGCGATGGCCTTTTATGC |
| | | GTACTTAAAAGAAAAACATAAAAATAAGCTGCAAGAGTATCCCTCGATTAAAGAACTGATTGATCAGTCACAGC |
| | | CGGAAAACACAAAAACATCCTCAAAAACGATTAAGAGTCGCCTTGAAGAACGTCTGAAAACATACAAGGTTGA |
| | | TGCGGCAAAAAAACTGAAACGATTAGCAGAGAAACCGGACGGCGTACAGAGCGGAAGATTAGCAGATGAACT |
| | | GGCGCGTGACATCTTATGGTTACAACCATCTTCACCTAAAGAAGGCGGAAAAGATAAACTGACGGGTGCCAACT |
| | | TTCAGGCACTGCAATACGCTCTGGCCCGCTATGGCTTTATGCGTACAACTCTTTCCCGCATTTTTACCACGGCCG |
| | | GTTTGATTGGCAGCGGTAATGCACACCCGTTTCTTGATAAAATTAATCCTCAGGATTATTCCAAACTGACGGCCT |
| | | ACTATGTTGGGTATCTCAAACAGAAGATAGTCTACATCGATAAACAGTTAGAAAAATTAGCAAGAGGTAAAGTC |
| | | AACATTCAGTTTCATCCCACGCGCAAACTGATTAAGCAAAGCCAAATCAACACCATTGAACCAGAAAAAGAGA |
| | | CCGTTTTTCTTCCCCGTAATATTTTTACAGAGAAAATAGAACAAGCCTTATGTCAAATTCAGGGTAACTTTAAGT |
| | | CGAATATCGAACGCGCTAAGACATCAGGTAAAGGAGTAAACGCCAGCAAATTGATTCACTTCTACCTGGAGTTA |
| | | TATCTCAAAGATGCAGTTACCGAATTCTACAATATTAAACGAAAATATTCCTGCTTATGTTATCCACTCATTCCA |
| | | TCAGAAAAGTATAACCTGAAAGAATATCAGAATACGGAAGAACGAAGTGAGCGCATTGACCGGATAAAAGATT |
| | | TTTACAATTTTAAAGAGGTGACCAAAAAAGCTTGTAAGGGCCAGGAGTTATCTGAAGACGAGAAAAAGCTTTAT |
| | | AAGAAATATATTGAGCTGCAGAAAGTTATCGACAATGAAAAGATGATACGCTTGCGCAAAGTCCAGGATATCA |
| | | CTCTCTATCTGTGGATGCGTCTGTTCATTGAAGAAAATCCAGAGCGCATAGTCTTCAATAAAAATGATCGGCCGG |
| | | AAAATAGTTTGCTTAAGCTGAAAGAGATGGATAACACTATCCTGGATCATACCACTGCGAGAAAAATCAATATT |
| | | GACACCCCAAACGGTAACGTGACTATTGAAGATGAATTCAAAATTAAAGACTATGGACGTATAACTACCCTGAC |
| | | CACGGAAAAGCTGCCTCAGAGCTTGATCAAATTCATTGGGATTCTGAATAAGCCTTTAGACAAAAAAGACCGCC |
| | | CATCGCTTTCATATAGCTATATCTATCATGAGACCAATGCCTTTTATCGATACCGACCAGAAATAATTAAAATGG |
| | | CTCAGGATATCGAGAATAAGATCATAAACGAGTTAAAAATCGATATTCAGCCGGAAGCGGAAGGTTACTATAA |
| | | CTTCCGTCAAATATTAGAAGAAATAAAAGAGAAGTCGAGTGACATCAATCTTGAGTTATTAATCAAAATCCGCA |
| | | ACGCGTTTTGCCACAATGAATATAAGGAATTGGACAATGATCAGCATAAGTATCTGAGTTCATTGTTTAAGCCG |
| | | ATCGCGGATATTAAGCAGACAGCTACTTTGGCATACTTATTGCACATGCTTTTTGAAACGGAATACCAGAAAGT |
| | | GATGATTCTGAAATAA |
| 301 | JW13124 | ATGAAAAAGAAAAAAGATTCTCACAAAGCAGATTGGCGCGATGATCTCATTTCAATTAAACATCTTCTGGTAAA |
| | | GCAGGAGAAAGCAAAAGCGGCATCCGCCCCGAAAAAACCCCCAGCCCCTGTTGCATTGATCGACCTCTCCCACA |
| | | TGGAAGAGCAGCGCCGCGAATTGCAGGCAGAAGATTCATCCTCTGCCAAACCTACAAAGAGTAGCGCAAAAGC |
| | | GGCGGGCATGAAATCCGTATTTTTATTAAGTGATAAAGAACTGCTCATGACCTCATTCGGGCGTGGGAACGATG |
| | | CCGTTCGGGAAATACGGGTGCAAGGCGACGAAGTACAAGCCTTAAGAGACGATCCGGCTTACCGCATCGAAAA |
| | | AGCGGATAGTGGATTTGACATCCATGGTCGTACTCCTACGAAAGGTTATACGGACGATCCACGTTACGCAGCGG |
| | | AAGGTCCACCGGAACACCGGGATCTGATCGATTGCCGAAAGGCCTTGGAAAAAATGTATTTTGGCGAGGAGTGT |
| | | GAAGATAACATACATGTACAGTTAGCTTACAGTATTTTGGATATCGAAAAGATACTGGCCGTCCATGTGAATAA |
| | | TATCGTCTATGAATTGAATAACTTGTTACGTGGTAAGGAAAAGTATTACAAAGATTGGATTGGTTATATGGGAA |
| | | AATATTACACCTATCAAGAGGTGCTTAGAAAAGAGTTCAAATCAAAGAATGATGAAAAGAATCTTACGTTTGTA |
| | | CACAACATGATTTTAAACGTCATGCAGGATAAACGTCGGATGTATTTCGGCAAAATCTTATGTGGTCCATCTATT |
| | | GCGAAAGAGGACAATCAAGAAAAAAAGAAGCAGCGTTATGAAGAAGAGCGTGAACATGCGTATTATATCTTCC |
| | | TGATTCTCGGTATGGCGAGACAAATGCTTGCGCACGGTGATGAGAGCACACGCTCATTGTTATTCTGTTTTGATG |
| | | AAGAACATGATTGCAATAAAACAAAAGAAGTTCGCATTAAGCTTCGTCAAACCTTAGATGCTGTGTATTCTGAA |
| | | CGTGTAAAAGAACTGAACGATGAGTTCATTGATACCTCTTCAAAAGACTTAGTTATGCTGTGCCGTGTAATGCAT |
| | | GCTCGAAGCCCGGAGAAAAAGAAGGCTTGTGTTCGGGATTACTATGATTTTGTTGTTCGAAAAGAGTACAAGAA |
| | | TCAGGGGTTCTCGGTAAAACGCCTGCGTGAAACTATCATTCTGCGTACTCCTCAGGCAGCCGTGGTTAATGATGC |
| | | ACAGTACGATACAGTCCGCCAAAAACTTAATAGACTGTTTGATTTCGTGATTTTTGACCATTATCGTAAGCATGC |
| | | AGCTGAAGCCGAACAGATTGTCGCCAGCCTTAGAGCAGCACAGAGCGATATTGACAAAGAGTTAATCTACCGA |
| | | CATGCAGCAAATAATCTTTGGCAGGCGATAGGGAAAACCGTGCTGCAGGACATTCTTCCTATGATGAACGGTAA |
| | | TGCAATAAAAGGCATTGCTGCAGATCCGGATATAAAGCTGTCAATGATTTCCGACATTATGATATCTGATGATG |
| | | CTGATTATTTCGTCAAATTCATATATCTCTTGACTCGGTTTCAAAATGGAAAAGAGATTAATGACCTGCTGACGA |
| | | CCTGTATCAACAAGTTTGAAAACATCACAGCTTTTATTTCCGTGATGGAAGAACAGGGTATTTTCAAAGAATTTC |
| | | GTCAGGAATATTCGATGTTTGACAACAGCGCAGCTATTGCCAAACAACTGCGCGAGGTCAACAGTTTTGCACGT |
| | | ATGTCCATGAAAAGCCAGGACTTGGGATTGGCAGACAAACTGGTCATGTTCGAAGACGCGGCCGATATTCTTGG |
| | | TTATTCAGATCCCCAGGCCGGCAAACAACTGCTGGATACGATACTGAATCCGTCGCAGAATACAGGCTTTCGAA |
| | | ACTTTATAGCGTCTAATGTCGTTAAGTCAAACCGGTTTCATTATTTGGCCTGTTTTTGCAATCCGAAAACGGTGC |
| | | GCAAGCTCGCCGAAAACAGAGCCGTGATAGACTTTGTGCTCAGCGAGATCCCGGATGCGCAGATCCTGCGTTAC |
| | | TACACTGCTTGTACCGGAGCGAAAGAAGGCGCAGATCCAGGGGAGATGCGCGCTTTTCTGGCGGAAAAACTGA |
| | | CTGGAATCACCTTTGAAGAGTTCCGTAACGTTAAACAGAAAGATCGGTTTGCTTCGCCGGAAGAGAAACTGGAC |
| | | AAAGTCCGCAAGCAAGCCATCATTCGTCTGTATCTTACCGCGCTGTATCTGCTGGTTAAAAATATGGTTTATGTT |
| | | AATAGTCGGTATTTTTTAGCTTTCCAATGCCTCGCTCGGGACAACGCGCTGCACGGTTACACCGATAATGACATA |
| | | AAGAATGATCCAGCTGCCTTTGCCCGCCGATTTTTAAGTGAGCCGCGGCATCGGAAGAATAGACGTGCTGTAGC |
| | | CAATATCGAACAGAACATGGCGAATAGTGATCCCTGGATAGTGCGGGAATACAGAAACGCCGCCATGCATTTG |
| | | AGCGCGATTCGCCGCATGCCGGAGTATATCGCCGATGTGAAACGTATTAGCTCGTATTTTGAGCTGTATCACTAT |
| | | ATTATGCAGCGTCACCTCGCGGACCAGCATACGCGAAAAGAAGGAGAGGGTGAGGAAGCGGTAAAAAATGAA |
| | | GTTGTGCTGCGCTATTTTGCTGACGTTCGCAAATATGGCTCTTACTGCAAAGACTTCCTCTGGGCGCTGAATGTT |
| | | CCTTTCGCATACAATCTTCCACGCTACAAAAACTTAAGTATTGAAAACTTATTTGACCGTAATAGACCCGGAACA |
| | | AAAGCAGGCGGGCCTACAAAATCTGCTGGCCCCACTGGGGCATAA |
| 302 | JW13125 | ATGAAAATTATACGTTCGAAGGGACAAAGTTTTACTGAGCATTCAAAAGACGAGTCTAACACTGACCATCTGGA |
| | | ACGAGGGTTAGAAGCAAAACGGGAGCGGAAATTAGTACATAGTGAACATAAAGATAAGACGTTATTTCATGGG |
| | | CGCGAATTGGCCCAGTATGTTGGAGAGGATCATGCATTAGTCCTGCGGCAGGCCATATCCGTACTGGATAAAGT |
| | | TATTCGTCCGCCGCGTCGCCTGCGTGATTTCGAGCTTCAGGCCTATGTTGACCGGGCTAAACTGGCGCATGAGTT |
| | | GTGGCTTCTGGTACTGAATAAGTGTAAAGGCGACTTCACCAAGCATCCTGATTCCGATGAGGTGCAAAAAATAT |
| | | TTGAAAAAACTTGGAGTGAACGCGCACATCCCTATACCCGTGACCGGGTTCAACCTTTAAACCCATGCGGCGAT |
| | | GAAAACGGAAAATATCTGCAGAGTCATCCCAAAGAGGGCGTGACTCGCCAGGATTTTGAAGGCCGTTGGTATTC |
| | | CGCCCTGTGGCAGGAAAATAATACGACCAGAAAGCCGGATTACGCAACGACCGCGCAAGCCATTATAGATCAT |
| | | CTTTTTAAACAGGAACTGCAGTTTGATGGGCAAGAAAGAACAAAATCAGGGCATAACGACGATAAGAATAAAA |
| | | ACAGCGGTACGCCGGAACCCACCGGAAAGGGTCTTGTAGAAGCACGCGGTCTGACTATAAAGGACAGCGTGAA |
| | | TGATCCCAGAATGGGTAAACAGGTGACAAAAAATGCTGATCTGCGTGAAGCGTCGAAAGAAATAGACAGCCAC |
| | | TATTTCGGTAAGGATATCGCGCACCAGATCTGCTCTGCTTTCAAAAATCGCAGTGAGAACGATCTCGATTTTAAC |
| | | CCTGCCGGCGAAATCGGTGCTTTACTGTACAACCACTTGCCTACCGCACTTGGAGCAGCGAACGGTGATGAACA |
| | | TATTAAGAGCGCGATTTGGAAACGCCATAATCAGGTGCGGCAATTTTACCAAAAGCTGCTCCGAACCAATCGCT |
| | | TTAAGCGAGCATTCCGCACTCGTGACATGGATAAACTGGATAACCTTCTGCCAAAAGATACTGAAAGCTTAACA |
| | | CGGGTTTTGGATGCGAAAGCTGAAAACGCATATCTGAGCGAACTGATTCGGCTTGGTAAAGTCATTGCCCATGC |
| | | GGCTGATATTCCGTTGCCGCCGGTAGATGGGGAGAACTTACAGGATCAGTTCAAAGCCCGGTTGGAGCATTTTG |
| | | CCACCAGCGCAGGTCAAAGCGAAATTAAACGCAACGAGACATTCACCCGCCTGTGGCGGACCTCAACCGCCTTA |
| | | TCGCTGAGAACGTTAACGGCATGGGTGGAACCTATTCTCGGTACCAATGAAAATAACAACCCTCGGAATTTTGA |
| | | TATTACCGATAATAATTTCCGCGGCAGTCTGAATCATCTGTTAGGAGAGAACACACGTGGTGATTTTTCTTGGGA |
| | | CCGTATTAAAGTCATCTTTGGACAAAAAGCATATCCAGCGTTATGTGATATTTCCGATAAAGGCCGTTCTCATAT |
| | | TTTTTCTTCGGGTGAGAGCCAAAATGAATGGCAGGATCACCAGGAAGTCGTCTGGGCGCTTGTCCGCCTGGCCA |
| | | CGCAAATACGCCATGGTACAAATCATTTTAATGTTCGACATCGTCTTGTCGATGAGATCACAGGCGGACTCCTGA |
| | | CGGGAGATAATCATCCACAGCATTTCCATAACAGACCGGGAAATATCGTTCACTCATCAATGCTTGAGCGTTTTG |
| | | ATAAACTGTTAGCGTTCGACACCCGTCTGCAATGGCAGGTTCTGTTAGACGACTTGAACGCGTTTAGCATCACGA |
| | | AATATCTTAATAATCCGCAACTGACAACCTTATTGCAAGAACTCATTAAAGGTCAGACCGGCACAGACTTAGCT |
| | | ACACCAAAATTCATGGCCCTGCTTCGCCGTGCAGCCAACCTGGCGCGGGCCGAAGAGAAAGAATATGGTGAGG |
| | | AAAAAATGCCTGAAGAATCGGAGTTTCTCTCTACAAACGCATTACGTCGTTTTGGCCCGCTTGAACTGACCGATT |
| | | TGTCAAAGAAAAAAGATACTAGCCTGAATGATGTTCGCATTGATCTTTTTCGCCATCTCTATCGTACCGGCTTCC |
| | | CGGCTTGGTTAGAAGAAAAACGCGTGGATGATGATTACCTGAAAAACGCCATCCGGGCTGTTTTTGATGCCCGG |
| | | GCATTCCGTGAGGAAGCATTTGCCGAAGAGCAGCGCATTGTGGCTCAGGGGACATTGTTAGAGTCTTCGGATGT |
| | | AGATGCCATATCTGATCTTAGCGCACTGTTTGCAACCCTGGCGGCAAATGCTGCAGGTGAAGAACGTCTGCGCC |
| | | GTAACTCCCGTGCAAGAGCCAAAACTAGAGAGACTGTAAGAGTTCAGAGTGGCGGCAGACCCGATACGAAAGA |
| | | GAAACCGTCATGGCAGGCCACCCTTAGAGAGGACATCTACGGTCACCTGTTTGCAGAATATTTGAATGAAGAGC |
| | | ACTTAAGCTGGATATGGGATATCAAGGAACCGCATAACCCTATCGCGGAAGATCTGAAACTCGGCGAAATTCCC |
| | | GATTTGGATCAGAGTAACCGAGAAAACTGGGAAAGTCAGTTTTACACCTGGCTTTATCTCGTGCCGAGTGACCA |
| | | GGTTTCCCTGCTCCGTCATCAACTCCACAAGACACTGGCTTTAGATGCAGCGGCCGACAAGTCGGTTTCCGGCTC |
| | | TGCTGCGGATGAGCAAGACCGGGCCACGCTTTCACGCATGTCGAATCTTATGGCGCTTTACACTGCCGTGCAGG |
| | | AAGCGGGTTTTGACGGTAACGAACATGTTGAAGCTTATGGGGAAGAAGCGGACTACATTTTTTATGCGGATCAC |
| | | GATCAATTCAAAAGTATTCATTCTCAAGATGACCTCACGAATACTGTGCCTGGCACGCGCCGTGGGCTGCGACA |
| | | GATCCTGAAGTTCGGTCATCTGTCCGCGGTGCAGCGAATATACGAAAAACACCGGGTAACTCAGGCTGAAGCTG |
| | | AAGACTTAATCGAACTCTATGGAAAAAAACGTGGCGGAGAAGAACCACAAATCAACGACTTCACAAGCCGTTC |
| | | AAAATTACACAAAGAGATCGAAGGCTTGTGGGAAAAACAGCAGCCAAGAGAGAAACACACTACCGACAAAGA |
| | | CATTGAGGATAAGTGTAAGGCGTACAAAACTAGCGCCATTAAAATGGCTCTGCATAATTTTAATATTGCGAGTG |
| | | CTCGCCTGACTGATCACGCAGATCTTCACCACCTGCTGATACGCGTCGTCACACGTCTGCTCGACTTTACGCTTA |
| | | CCTGGGAGCGTGACCGTAATTTCCTCTATCTCGGCATGCTCTGCGATAAGTTACGCACGATTGAAAAAGATGAC |
| | | CGAGGGTCTGTTCTGTCCTCTACTCTCAATCTTGAATTGCATCATTTGCCATACGTTGTGAAAAAGGGTAAAAGT |
| | | GCAGAGAAAAAACGCTGGTCTATCTGTTTAAAAATCGGGGATCGTCACGCTCAAGAATCTGCTGAAATTGGATT |
| | | CAGTGGGAGTGATGAATCAACAATTCAGCAGGCTTTGTTACAGGAGTACGGGCTGCTCCGTTTGTGGGACGACG |
| | | AAATGGGGTTGTCTCTCGATGCTCGGGATATTGAGTTGGATCTCCTGCCAACAGACCACCGATGCCTGTTTATAA |
| | | AGTACTTTGTGAAGTTGGCCGGAGAGAATGAAAAGGATGTTGCAGCCCGAGAAAAAGCACCGAAAAATAAACC |
| | | AATCACTGATCACTCGCAACGTAGCGGCGCTTATTCATATTCATATAAGATATCAAAGAAGCAGATCCGCAATG |
| | | ACTTTGCCCATTTCAATATTCTCACCAAAGAGCGTCTGAATCTCACCTATCTGACCAACGCCGTGCGCTCCCTGG |
| | | TCAGCTATGACCGGAAACTGAAAAATGCGGTTTCAACGGCCATCGCAGATATCGTCTCAGACGCTGGTCTGGAG |
| | | ATTCAGTGGACGTTGGAGCGGGACCGGCTGAAAAAGCCGTTGGTGATACCTAGAGTAGTCCACCACTTAGCATG |
| | | GTTACCCAAAATCAATGGGGAAGATGTATCCTTTTATCTTCCGGCTAGATCCGCACGGTTTACCTCAATGGTAAA |
| | | GGCGCTGTTTGATTTCGGCACGGAAGGCAATGTGGTTGAAATCGAGAAAGACGGTACGGGTATAACAGGAAGA |
| | | CTTGAATATCCTAGCGCGTTAGCGGAGCGCTATACCATTACAAAAACAGCAACAGACGAAGCCGGTGACGGTG |
| | | GCGAGATTCCCGAGACACCAGCGCAGATTTGTTTAATTCCGTCTGAAATTCTGACGTCGCTGGAAAATCTGCCTC |
| | | AGGAAGAAAGTAAAACTATGATAAAAAATAGACGGTAA |
| 303 | JW13126 | ATGAATCATACAATTGGTAAAGGCATATCATACAACCCCTTCAAACACCAGGACAAACACTATTTTGGATCGTT |
| | | TTTCAATTTGGCCGACAATAATATTAAAGACGTGTTTAATGAAATCGCCCAACGATTGAATCACAAAGATTCAA |
| | | ACCCGAAAAACATTATTAACCACTATACGGATAAAAATATCAGCCTCGTTGACTTTGAAAAATTCGTATCCCTGC |
| | | TTTCTAACTATTTCCCGATAGTTAATGAAATTGACCAAATTAACTGTGATGCTAAAGGTTCTAATGGGAATTATA |
| | | AACCGAAAACTAAGGAAGAAAGATTAGGCTACTTCAAAAAAACTAGTTACAGTCTGCTGGAAGCCATTGATAA |
| | | ACTGCGGAATTACTATACGCATTATCATCATGAACCCATCGAAATAGATCTGAACCTTTTCCCGTTTTTAGATCA |
| | | TGTGCTGCTGAAAACAGCTTTAAACACTAAAAAGAATTACCTGAAAAAGGGCAAAACCAAAGAGTTAATCAAG |
| | | GACAATCTGAAGCAGCAGTTTGACTTTATTTTCAACATCAAAGTTGAGGAATATCTGAAGGAAAAGAACCCTAC |
| | | ATCAAAGAAAATTGAAAGAGCGGGCGGTAAAATCGAAAATTTCAATAAAAGCTTAGTCGAAGAGATAACATCC |
| | | GCGATCTACAATGATGCTATCAAAGATTTCATCTACTCAAAAGGTGAAAATGCAGAACTGAGTAACCGTAAAAA |
| | | AACGAGCTTTTCAGACAAAGATTATTTTTATTACAACGATGACGATCACTTCTCTCTGCCGATTAGTTCTTCCGGT |
| | | ATAGTGTTTCTCTTGTCTTGTTTTCTGAACCGGAAAGAGATTGAATCCTTAAAAGATAACATCACCGGTTATAAA |
| | | GGTAAGATACCCAATAGCGAATTAACATTAAAACATAACGGTATTCGTTTTATGACAACGCATCGGATCTACTC |
| | | TCATTGGTGCTATAAAGGATTAAAAACCAAAATACGTACAAGTGAAAAAGCCACACGAGAAACGCTCTTGTTAC |
| | | AGATGGTGGACGAATTATCTAAAGTTCCAGATGTCGTCTATCAAAATATTAGTGATGACCTGAAAAAAACCTTC |
| | | ATCAAAGATCTTAACGAATATTACATTGACAATCAGGAAAACCAGGAGAACCTTTATAATTCTAAAGTTGTTCA |
| | | TCCCGTAATTCGTAAGAGATATGAAGATAAGTTCAATTATTTTGCCGTACGCTTCTTAGACGAATTTTTAGATTTT |
| | | CCAACATTGCGTTTTCAGGTCCATCTTGGCAATTATCTCGAGCACAGCACCTCGAAAAATATTGGTAACAGTAAA |
| | | ACGAACCGTGAAATCAAGAAGAAAATTTTTGTTTTCGGCAAACTTTCCGAAGTCAATAAGCTGAAGAACGATTT |
| | | CTTTGAGAAAAATAAGCAGAACGATACCTCATGGCAGTTTTTTCCAAATCCTTCGTATCACTTTCCGATGGAAAA |
| | | TTCGAACGACTTGAAAAAAGCGAATAAAATAGGCATCTACATAAACCATGACAAAAGCATTAACAAATTCAAA |
| | | CATCAAACCCAGAAGCAGACCCATGAGAATAAAATTAAGCTGATTCAAAAAGTAATCGGCGATAAGAGTAAGA |
| | | TTAAAATTGGTCAACCAATAGCATATCTGTCTATGAATGATATACATTCGATACTGTTTGAAGCATTAAAGAACC |
| | | CGAAAATTAAAGAGTCAGGAAAGATCGATGGAGAACATATTGAGTATAAGATCACGCATCAGATTAATAAGCA |
| | | GATTAAGGAAATACAGAACAAAAACGAGAACGCGAAAATCATTAAAAATCAGCAGTCAAAACAAGAGACGGA |
| | | CTTTAACATTGACAAGCTGATTAAAGACGTCAATAAAGAGATAACTATATCAGAAGATAAGATCCAAACGCTGA |
| | | AAGAAAATAAAAAACAGTATCAGAATTATCAACGCTCCAAGAAATCAGAAAAACACAATAACTCACGGAAAAG |
| | | AAATCATATTCTGTATAATAGTGAAAAAGGGGAAATTGCGACTTGGCTTGCGAATGATATCAAACGCTTTTTTA |
| | | GTAAAGATTTCAAAGACAAGTGGAAAGGGCACCACCACAGTAACTTTCAACGTAATCTTGCATACTATAATACG |
| | | CAAAAAAAAGAGGTGGAGCTCCTTCTGAAAGGTCTGGATTACCGCAAAACTATCCCGATGCTTGATTTTTCAAA |
| | | GAATTCTTTCCTGGACTTTTATCGCAAGTACCTGGAGAAACGCAAACAGTATTTTAAAAACTTGTTATCCGAGCT |
| | | CAAAAATCATAAAAGTGGGAAACACGATTCTATCGAGAAATTGAAGAAGAAATGCTTTACTCACTTCAAAAAG |
| | | CGTAACTATCGAAACAAAACTATAGAAGACAAAATTCAGAATATGCTGGCCAATCCTATCTTTATTAAACGCGG |
| | | CTTTATGGATACGAAACCTACGATGATTCCTGGGAAGAATTTCAATCAGAATAAAAGCGATTTTGCTGACTGGTT |
| | | TGTGGCTTTTAAAGAATTCTCGGAATACCAAAAATTTTATGATACCAATCTTTACCCTATCGATTTGAGCCAGAA |
| | | ATCCAAGAGCGCAACAAAAAAAATTAACACTGAGATCTACAAACAGAAAAAGAACGATTGGGCGATCTGGCAG |
| | | ATGACTAAGTATATTTTCAAAGACATTTTCCAACAGGACTCTCAGAATATCTCACTTTCGGAAATCTACCAGTCC |
| | | CGCCAAGAACCTATTAGCAACGCAAAAAATACCGCTACCGATAAACGTAAACAGAATTCTATCTGGGATAGCAC |
| | | AATTGATCTGCAGCTTAACCGGAAAATTAAAATAAGCGATGTGAAACTGAAGGATATTGGGAACTTTCGCAAGT |
| | | ACGAGAATGATCAGCGTATTAATACCTTTCTGGACTATGGAGATTTTAGTGATTGGATGGCCTATCTCCCAAATA |
| | | ACTGGCAAGAAAATTTTGAGTATAAGCCCATCAATGTTATTGATATCCAACTGGATGATTATGAGAAAATTCGT |
| | | CAGAACGTTTTATTGCAAGAGGTGCAGAATTTGGAACGGGAGATCTATAATAACGTAAGCAATAAGAATGAAA |
| | | TACTCGTGCAGGACTCGAAAGGAAATAAAAACCCGAATTTTAAAGCCTACATACTGAAGGGCTTATTGAAGCAA |
| | | ATTAAGAACCTTGATATAACTAATTTTAAACTTCCGCAGAATGCTAAAGAATTCGATACCCTCACCTTTAAGCAT |
| | | TTGCAGACTCTGAGCGTAATTGAGCAAAAAACCACCCTGCTGATTTTACTGAGAAACAAATTTGCACATAACCA |
| | | GTTACCAAATAAAGCAGCCTATGAATTTTGTCAGACAATTCTGGAGCGAGAAAAGTCCCAAACGTATGCGCATT |
| | | ATTATAGCGAACTGTTCAAGACCCTCAAAAAAGAGTTAACCGATATATGA |
| 304 | JW13127 | ATGGAAAATACTATTGAGATACAAAAACAATCCATACGTACATTAAACAATGCACCGCAATATTTTGGCCTGTA |
| | | TCTTAACATGGCGAGACTGAACATTTTTAATATTTCGAACTATCTCGCGGAAAAATTTGGTCTGGCAGTGTTAGA |
| | | TGAAGAAGAGAAAATAACCATTTCATTCCTTGGCGATAAAGGCAATAAAGAATACAAGACCAAGCAGTCTTAC |
| | | ATCTACTTTAATCTTATCAAGTATATGCCTGTCGCAAAAGTGTTTGATTTTGAAAAGCTGCCAAAGAATGAGATT |
| | | GACAAAACAAAAAACAATTCAGGGAAAGACTTCAACAAACTGTCAGACACCCTTAAAGTAATTTTTAAAGAAC |
| | | TCAACGAATTTCGCAATGATTACTCTCACTACTTTTCCACTGAGAAACAAGATAAACGTAAGCTTAAGATTAGTT |
| | | CCGAGCTTAAAGATTTCCTTAATATTAACTTTAGCCGCGCGTTATCGTATACCAAGAATCGTCTGAAAGATGTCT |
| | | TTAGCGATGATGACTTCAACATTGCATCTCAAACAGTTGTTGTTAATAATGATAATACCATCACACAGGATGGA |
| | | ATAGTGTTTCTGATCTCGATGTTTTTGGACATGGAAAATGCATTTCAGTTCATCAATAAAATCATAGGGCTGAAA |
| | | GGCACCCAGACTAAAGCCTTTAAAGCTAAACGTGAAGTTCTGATGACATTTTGTGTGAAACTGCCACACGATAA |
| | | GTTCGTATCGGAAAACCCGCAGCAGACATTTTCGTTAGAGCTCATCAATGAGCTGAACAAATGTCCGAAGCTGC |
| | | TTTACAATGTGATTACAGAAGAGGAAAAACAGATTTTCAAACCGCAGATTCAAACAGAACAGATTGAGAACATT |
| | | ATATCCAACAGCGTCCCGGATACCATTGATGATTACGAAAACTATATCGAGAGTATAACTAAAAAAGTGAGATA |
| | | CGAAAATCGCTTCTCCTATTTTGCACTGAAATATATTGACCTCAAAGAACTGTTCAAAAAATGGCGGTTTCAAAT |
| | | TGACCTGGGAAAAGTTGTATTAGACAAGTATAGCAAACAGCTGAACGGTAAAGATGAAGTCCGCACGGTCACT |
| | | GAAAATGCGAAGGCTTTTGGTCGTCTGCAGGACTTTTATGATCAGGAAAAGATCCTGAACAAAATCAACATCGG |
| | | GGAAAATAAAACTCGGTTTTATCAGTTCGCCCCACATTATAATTTTGACGTGCAGAATAATAAAATCGGGATTA |
| | | GTAAGAAAGAGACGACGGCGAAATTCATCTCAAAGAACACAACGCACAAAGTTAAGTTCAATTTGCTGCAACC |
| | | ATTGCCTGAGGTTTTTTTAAGCATTCACGAATTGCCGAAAATTATTCTTCTGGAGTATCTTGAACAGGGAAAAAC |
| | | GGAGAAATTGATCAATAACTTTATAAAGCTCTCTAACAGTACCATCCTCAACAAAAAATTCATTGAAACGATCA |
| | | AGTACAAACTTTCAGATCTTGATGTCTTTCATAAACGCTCCATGGGTAGAAAAGAAATTTCTGCTTATCGCAAAG |
| | | ACATTCTGAAGTATCTGATCGCCCGTAAAGAAAAACTCAACCAGATTTTGTCTGAACATAACCTGAGTGTTAAA |
| | | CAGATACCCACTCGCATACTCGATTATTGGTTGAACATTGCAGATGTTCAGGAAAAAACCGCCATTAGTGATCG |
| | | AATAAAACTTATGAAACGAGATTGTATGGACCGTTTAAAAGCCATTAAAAAAAATAATGCGCCGAAAATTGGA |
| | | GAGATGGCTACGTTTTTAGCAAAGGACATCGTAGACATGCTGATATCTGAAGGTAAGAAGAAGAAAATCACTA |
| | | GCTTTTATTACGATAAAATGCAGGAATGCCTTGTACTGTTCGCTGACAAAGAGAAGAAAGAATTATTCATATCA |
| | | ATATGCAGCGAGTTAAAGTTAAACGACGCCGATGGTCATCCATTCTTAAAGAATATCAATCTCAGTGATATTAG |
| | | ATATACCTCTGATTTGTACAAGATATACCTGCAAGAAAAAGCCGATAATCGGAATCAGCGTAATCGTACCGATA |
| | | CGTCTTGGCTGGCTAAAAACTTTTACACGTTGAAAAATGTTGAGGTGTTCGATAAAAAACAGCAACGTAAGATT |
| | | TTTAAGCTTCAGACCATTGTTGAATTGCCGCAGGATAAAAGTAAAATTCCGTTTACTATTCGACAATTGGAGAAG |
| | | GAGAAATCAAGCTTTAATAAGTGGTTAGAATATATCACCAAAGGTAAAGAGACCACAGATAAGAAAAAACCCG |
| | | TGAATCTGCCCGCAAATCTTTTTGATGACACGTTAAAAAAACTGCTGAAAACAGAGTTGTCAAAAAACAACATC |
| | | CAATACAACAAAGAAGCCAACTATAATCAACTTTTTAAAATATGGTGGAAAGAGTTTCGTAAAGACAATACCCA |
| | | AAATTTCTATACTGCGGAGCGCGAATATACTTTCGAAGAAGAAAAATTGAACTTTAAGATCAATACGCAGCCAA |
| | | AGTTTGAGAATTATTATACTCGCTTCGCGGAGAATGTCTTTAATAAAAAACAGGCGTTACGCAATGAAGAGCGT |
| | | AAAACGAAACGGAATCTGCCGCCTATTCAGAAAATCCATGTAATTAAGAAGATACGCAACAAAATAGGAAATA |
| | | CGGAAAAGGAAATTCGGATGCTGCAAGAAGAAGACCGTTTAATGTTGTTAATGTTTGAAAAACTCACAAAAGA |
| | | GAATCTGAATCTCAAACTGGAAAAGGTTAACGAGTTACTCAACGAACGGATCGAAATTAAGGAAAAAATACCT |
| | | GGTAAACTGTCATTTGATGATCTTGGCGAGAAAACAATAACTAGAAATATTGTGGAAACCCGGAAACGCAAAG |
| | | AATATTCCGTGCTGCAGAAATATATCTTTGACAGACGATTGCCTGAATTATTCGAATATTTTAATGAGACAGATA |
| | | TACTGATCGAGAAGATCAAAACCGAACTGGATGCTTACAACAAAGCCAAAGATATTGTATTCGATCTGATTTTC |
| | | AAACTGGAAGAGGCTATTATTAAGAAGGACGAAACAGGTATTAAAGAACTGAACAAAGATCAAAATGGCAATA |
| | | TCCAGACAGGCAATATTCAGCATAAACCCTATCTTCATTGGCTGCTTAAAAAGAATATGATTACCGAGAAGGAA |
| | | TTCACCTTCATTAATATGGTCCGTAATACTTTTAGCCATAATCGTTTTCCTCAAAAGAAAACGATGGAACTTTTC |
| | | ATCAAAAAATGGAACGACAACAATTTTGCCTATCAGATCCTGGAAACTTACAAGCAGAAAACCAACAACATCAT |
| | | TGAAAAATTAAAAGATATGTAA |
| 305 | JW13128 | ATGAAAAAGAAAAGTAATATAAAGATCATGGGCGTTAAAAGTGTACACTATTTCAATAATGACGTAATTATCGA |
| | | GAATTCACTTAGTGAAAATGTCGAAATTTTGTTCAAACCAAATTACCAAAAAATAGACGAGTTAAAAATCCTGA |
| | | ACTCAAATACGAATAATCAGACAAATAACCGGGTTGAATTCATCAATGATAATGAGAAAAAAGGCTTTACCCTG |
| | | AAAAAGAAAGATTCTTCGTTTGAGAAAGATAAAGCACCGAAAAGTATTAATTCGTACGTCAATAAGGTAAAAA |
| | | ACAACAGCTTTATTCACAATGAGTTATTCGGAAACAAGAATAATAACTTTATTCCGCAGATCTATAGCAATTTTG |
| | | AGGATATACGTAAAATCATACTGAACTACATTGATCATATCATCTATTCGGTGAATAACAAAATTATAGCTAAC |
| | | AAGTGCAAAATTGAAGTTGATCGTTTATCTTTTGATGATATTGGTATGTTACCTGCAACCAAAACTTATGAAGAG |
| | | TATGGCCAGACACCGGAACAGCGCGAAAATATGACTGATGTGGTTCTGCCCGCCTTTAAAGAAGTACTGAAAGA |
| | | TAATAATATCAAAACGGGCAATTACGGTAATATCAAAGTTGATTACTGGAACATTGTTAAGTACGCTTACAAAA |
| | | AATCTAGATGTCAGGAATATACTATACGCGAACTTAGCAATGACTCTTTAAACTATATTAACAATAACATCAAT |
| | | GCGATTGCCGCTTATAGTAAAAAAGTGAAAGACTATCCGTTACTCAACGAACTTAACTTAGATCGCAATAAGTA |
| | | TATTATTCATCTCGAGCGCAAAAATGAGAATGAAAAAACTGCCATTAAAAAGCTGAACAATCATTTTAGTGGGG |
| | | AAGAAATCTTTAAAGAAATCTATGGAATCGAAAAAGAATTCCAGGAAAAAAAGGAATTATACAATTATCTCCGT |
| | | ATCATCTCTTTAATTCGCCAATATTGTGCGCATTTTATTACGTTTGATAGCGAAGAGGATTCAATTAAAGCCCTT |
| | | ATAAACCCCTCTAACAATCTTATCAAGAACTTTAAGACATCCTTCATAAAAAACAACGAAAAGTATCTGCTGGT |
| | | ACTTTATGAATATCAGGATTTCTATTCTGAGCTGCTGAACAAAAAAAACATTAACAAGGAGAACAACATCTTCA |
| | | CTGAGTTTTACAATTACTTAATAAAAGATGAGGCGAAAAACCTTGGTATTTCCGTTGATAAACTTCAAAAGCGG |
| | | TATGTCTTTAATTTGAATATAGAGGACGACACAAAAAAAGCGGAATATCTGAACAAAATGAAAGTCCTGATCAA |
| | | GTTTTTTATTACGCTCGAGTTGAAATACGATAAGGATTTCAATAAAAATGACAGCTCCGATGTGAATTCCAAATT |
| | | CTATTATATCGAAAAAATTAAAACCGCTAAGTACGCGAATAACGAAGATATTATCAAAGCCTTGAGCGATAAGT |
| | | ATAGCGATTTTTCTATTGATGATTACAAAGACGAATACGATTCTCTCTATAACCAGTCTAAAGATAAGATCTATG |
| | | ACGAATTATATGAAAAACTCAACGTTAAGATTGACACCGATAAACTTTCTGATTATGTGATTGATATTCTTGGTA |
| | | AAGAAGAAAACAACATTATCAAGAAGTTCACGTTTGACAATCTGAAAGTCAAATATTCTAAAATTGAGGAAGA |
| | | GGTGAATGAGTACAAGAAATGGGAAAAGATTAAAAACAAAGAGAAAAAGGAGATTTTTGAGAATCAGATACGT |
| | | GATCTGTTTCCCGACATTTTTAAGCATATTAACGAGTACAATGAGGAGTATGAAAAAAACTTCAAAAACAAGAT |
| | | TAAACTGCCTAATATATCCACCGATTCGAAGTTTTTCAATCTCATCTATTTTGTTTCTGAATTTCTGACTACTAAA |
| | | GACGCAAATAATTTGTTTTCAACCATATTGACCAAACTTGACTCGATTAGTAGCCTCTTAAGTCTGTTAAACTCG |
| | | TATGACAGTAATAGCAATATAATAGGCAATGAGTTCATTGATTACAAGTTTATGTTGGACAACAAGGAAATTAA |
| | | CATTGAGAACATTTGCAATTTCAAGGATGATATAAAGATACTGAAAAGCCTGCGTATAAAGGATAATACGAAAA |
| | | CAAGCAAAGCTAATATTAACGACGTCGATTTTAACAACATCTTTAATTCATTCAACGATGCAGGAATGTCACTG |
| | | GAAAAATTCAATCGGAAAATTGAATTAACCACTGAATCCCAAGAAGATGATTATGTTGCTAATAACTACAAGGA |
| | | GTTAGTTAAGTATAATGCCCTGTCATCCTACAAAAAGTCCGTCAATGAACTTAATAATAAGAAGTACAACAAAA |
| | | AAACGTTGCTCGATCTGAAAGACGAAGATTTGAAAGAACGAATCAATAACTATTTGTCCACCTTAGACCTTTTC |
| | | AAGAATTATAACTGCGACAAAAATTACATAAAACTGGTGAAAGAAGCCGTGAACTACAAAAAAAAGGAAAAAC |
| | | CTTTGAAACAATACCTTCGAAATTCTATCTATTCGTCAAAACAATACCAATACATAAAGGATTATGCGAATACAC |
| | | GGCTGTGCAAATACATCATTGCAAACGAAAAAATTCTGGACTATATCTTAAACGATAAGTTTGATACAGAAGGC |
| | | ATGAAAAAACATCTGTATCGCGTATATCTGGATTACAAAAAAGAGGAGATTACTAAGGACAAAATTGACAACA |
| | | ATTACAATAACGTGAACATTAATGAACTCAAGAAAGCCCTTCAGGAAATTAACCTGAAAACGCTGAGTGATAAT |
| | | ATTCTGAAGAATATACCAGAGGACAGAAATTTGAAAGCAATTATAGGTCTTTATTTTGAGGTATGTTACATTGTG |
| | | ATTAAAGGGTTGTATGACGTGAATTCCGCCTATATGATACAGATACAGGAATATGAGAAAATCTACAAAAAATG |
| | | TTTCGGAGCGAGCAATTTTTCATTCAACACCGAATTACTGAAGAAGTTTGAAGAATATGAAAAAAATCGAAACC |
| | | CAGAATCAAAAAGTCTGAAACAGATCAAAGGAATAATTGGTGATGGGAAATTTGGTCACGAATATGTGCGTGA |
| | | GGAAACAGATGATGATGAAAAAAAGAAGAAAGCACTGATCTATATTCGTTTTCGCAATACAGTTGAACATAGCT |
| | | CATTGCTGGCGAATAGTGACATCCTCAAAAACTTTAATGAGGACGAAAGCTTTACGAAAAACGAATTCAAAATC |
| | | ACAAGCATGTTTCAACTGTACCACATCCTGATTCAGCGTTTACTGAAAAAAGACAGTTCAAATAACAAAGACAA |
| | | AGATGGTAATCCTAATCCTTATTATCCGATTGGTAGTGAATTTGAGCCGGATAAAAAAGGCTATTCGACCAAAG |
| | | CTCTGATCATTATGAATCTTCCGTATCTGTATAATGTTGCAAGATTCAATAATCTTACCATCGAAAAATACTATCT |
| | | TCGTAGATTTGAAGGGAATGTCAAGAATAAAAAAGAACCAAATTCATCCTCAGAATAA |
| 306 | JW13129 | ATGGGTATAGACTATTCTCTGACTAGCGATTGCTATCGCGGTATTAATAAAAGTTGCTTTGCGGTTGCCTTGAAC |
| | | ATTGCATACGACAATTGCGACCATAAAGGCTGTCGTACATTGCTGAGCGAAGTCTTACGTTCAAAAGGTGGAAT |
| | | TAGTGACGAACAGATCAAAAGTCAAGTGGTAGACGGAATACAGAAGCGGCTGAAAGATATCCGAAACTATTTT |
| | | TCTCACTATTATCATGCAGAAGATTGCCTGCGATTCGGCGATCAAGATGCAGTCAAAGTATTTTTAGAGGAGATC |
| | | TACAAAAATGCTGAAAGCAAGACTGTAGGCGCGACTAAAGAATCAGACTATAAAGGTGTAGTCCCGCCGCTGTT |
| | | TGAATTGCACAATGGAACGTATATGATTACTGCTGCGGGAGTAATTTTTCTCGCGTCGTTCTTCTGTCATAGATC |
| | | TAATGTGTATCGCATGTTAGGTGCCGTGAAAGGCTTTAAACATACCGGCAAGGAACAGTTATCAGATGGGCAAA |
| | | AAAGAGATTACGGCTTTACTCGTAGACTGCTGGCGTATTATGCACTTCGAGATTCATATTCTGTTGGCGCAGAAG |
| | | ATAAAACGCGTTGTTTTCGAGAAATTCTGTCGTATCTTAGTCGTGTACCCCAATTAGCCGTTGATTGGTTGAACG |
| | | AACAGCAGCTGTTAACCCCTGAAGAGAAGGAAGCGTTTCTGAACCAGCCTGCGGAAGATGAAGGCGGCGATAT |
| | | TTCCGATTCGTCTAGTTCAGACAAGAATAAAAAATCTAAAGAGAAAAGACGTAGCCTGCGCCGTGATGAAAAAT |
| | | TCATCCTGTTTGCTATTCAGTTCATAGAGGGCTGGGCCGCTGAGCAAGGATTGGATGTTACATTTGCACGCTATC |
| | | AGAAAACTGTTGAGAAAGCTGAAAATAAAAATCAAGATGGCAAACAGGCCCGGGCTGTGCAGCTGAAATACCG |
| | | GAACCAAGGGTTAAACCCAGACTTCAACAATGAATGGATGTATTACATCCAGAATGAACACGCCATCATCCAGA |
| | | TCAAGCTTAATAATAAGAAGGCGGTGGCGGCGCGTATATCCGAAAACGAACTGAAGTATTTGGTTCTTCTGATC |
| | | TTTGAGGAGAAAGGTAATGATGCTGTTCAGAAACTGAACTGTTATATCTACAGTATGAGCCAGAAAATTGAGGG |
| | | AGAATGGAAACACCGACCTGAAGATGAACGGTGGATGCCGTCCTTTACAAAACGCGCTGATCGTACAGTTACCC |
| | | CCGAAGCGGTGCAATCACGGCTGTCTTATATTCGCAAGCAGCTGCAAGAAACCATTGAGAAAATTGGCCAGGAA |
| | | GAACCGAGAAATAACAAGTGGTTAATCTACAAAGGTAAGAAAATATCAATGATCCTGAAATTCATATCCGACTC |
| | | TATTCGCGACATCCAACGCCGTCCAAATGTAAAACAATATCATATTCTGCGGGATGCACTTCAGCGCTTGGACTT |
| | | TGACGGCTTCTACAAGGAATTGCAAAATTATGTGAATGATGGTCGGATAGCAGTTAGCCTGTACGACCAAATAA |
| | | AAGGTGTGAATGACATTTCGGGGCTGTGCAAGAAAGTCTGCGAGCTCACCCTCGAGCGGCTTGCCGGTCTTGAG |
| | | GCTAAAAATGGTTCGGAACTTCGTCGTTATATTGGGTTAGAAGCCCAAGAAAAACATCCAAAGTATGGTGAATG |
| | | GAACACGCTTCAGGAGAAAGCAAAACGCTTCCTCGAATCTCAATTTTCCATCGGAAAGAATTTCTTGCGCAAAA |
| | | TGTTCTACGGGGATTGTTGTCAGAAACGGTGTTTTGATGAGGAAAAAGGTTACAACACCCAGGCAAAAGAACGA |
| | | AAAAGCCTCTACAGTATCGTCAAAGAGAAGTTAAAAGACATTAAGCCAATTCACGATGATCGGTGGTATCTCAT |
| | | TGACCGCAATCCGAAAAACTACGACAACAAACACTCCCGTATTATTCGCCAGATGTGTAATACCTACATTCAGG |
| | | ACGTTCTCTGCATGAAAATGGCGATGTGGCATTATGAAAAGCTGATTAGCGCCACGGAGTTTCGTAACAAACTT |
| | | GAGTGGAATTGTATTGGGCAGGGTAATATGGGATACGAGCGCTATAGTCTGTGGTATAAGACCGGCTGTGGAGT |
| | | CGTCATCCAGTTCACGCCCGCCGATTTTCTGCGTTTAGATATTATAGAAAAACCGGCAATGATTGAGAATATCTG |
| | | CCAGTGCTTCGTGCTGGGGAACAAAAAACTTAACAGCGGTGCCGAGAAAAAGATTACATGGGATAAGTTTAAT |
| | | AAAGACGGGATAGCGAAGTATAGAAAAAGACAAGCTGAAGCAGTGCGTGCAATTTTTGCTTTTGAAGAAGGGC |
| | | TGAAAATACAGGAAGATAAGTGGTCCCATGAACGTTATTTTCCGTTTTGCAATATATTAGATGAGGCCGTTAAA |
| | | CAGGGTAAGATCAAAGATACGGGCAAAGATAAAGAGGCATTAAACCGCGGTCGTAACGATTTTTTTCATGAAG |
| | | AATTCAAGTCAACAGAGGATCAGCAGGCCATCTTTCAGAAATATTTCCCTATAGTGGAAAGAAAAGATGACACA |
| | | AAAAAACGTCGCGATAAGAAACAGAAATAA |
| 307 | JW13130 | ATGGAGAACCAGACACAGAAAGGCAAAGGCATCTATTACTATTATACCAAAAATGAGGACAAGCACTATTTTG |
| | | GAAGTTTTCTCAACTTGGCTAATAACAATATTGAGCAAATCATTGAGGAATTTCGTATTCGTTTAAGTCTGAAAG |
| | | ATGAGAAGAACATCAAAGAGATTATCAATAACTATTTTACAGACAAGAAATCGTATACTGATTGGGAAAGAGG |
| | | AATTAATATATTAAAAGAGTATCTGCCAGTTATTGATTACTTGGACCTTGCCATTACAGATAAAGAATTTGAAAA |
| | | AATCGATCTGAAGCAAAAGGAAACCGCCAAACGGAAATACTTTCGTACGAATTTTAGTCTGCTGATTGATACGA |
| | | TTATTGATCTCAGAAACTTTTACACTCACTATTTCCACAAGCCGATATCCATCAATCCAGATGTTGCAAAATTCC |
| | | TGGACAAAAACCTTCTGAACGTGTGTCTGGACATTAAAAAACAAAAGATGAAGACAGATAAGACCAAACAGGC |
| | | GCTTAAAGACGGTCTGGATAAGGAACTGAAAAAATTGATAGAACTGAAGAAAGCGGAGCTGAAGGAAAAAAA |
| | | GATAAAAACCTGGAACATAACTGAAAACGTCGAGGGGGCAGTCTATAATGATGCCTTTAATCACATGGTTTATA |
| | | AGAATAATGCAGGGGTAACAATTCTCAAAGATTACCATAAAAGTATCCTTCCGGATGACAAAATTGACAGCGAG |
| | | TTGAAGCTGAACTTTTCAATATCTGGTTTAGTGTTCCTGCTGTCTATGTTTCTTTCCAAAAAGGAAATTGAACAAT |
| | | TCAAATCGAATCTCGAGGGTTTTAAAGGTAAAGTGATTGGAGAAAATGGCGAGTATGAAATAAGTAAGTTCAAT |
| | | AACTCATTAAAGTACATGGCAACTCATTGGATATTTTCATATCTTACGTTCAAAGGCCTGAAACAACGCGTTAAA |
| | | AACACTTTTGATAAAGAAACGCTGCTTATGCAGATGATTGATGAATTAAACAAAGTTCCTCATGAAGTTTATCA |
| | | AACCTTGAGCAAAGAACAGCAAAATGAATTCCTGGAAGACATTAACGAATATGTGCAAGATAATGAAGAAAAT |
| | | AAGAAATCCATGGAAAATTCCATTGTGGTGCATCCAGTAATCAGAAAACGCTATGATGACAAGTTTAATTATTT |
| | | TGCCATTCGATTTCTTGACGAATTTGCTAACTTCCCGACCCTGAAATTTTTTGTAACTGCCGGTAATTTTGTGCAC |
| | | GATAAAAGAGAAAAACAGATTCAGGGTAGCATGTTAACGAGCGACCGGATGATCAAAGAAAAAATTAATGTGT |
| | | TTGGTAAGCTGACAGAAATTGCAAAGTACAAGTCGGACTATTTCTCCAATGAAAATACTTTGGAGACATCGGAA |
| | | TGGGAATTGTTTCCGAATCCGTCCTACCTTTTGATACAAAATAATATTCCTGTACACATCGATCTGATCCATAAC |
| | | ACCGAAGAGGCTAAACAGTGCCAGATAGCGATAGATCGCATAAAATGCACAACTAATCCGGCAAAAAAACGTA |
| | | ATACACGGAAGAGCAAGGAAGAGATCATCAAAATCATCTATCAGAAAAACAAAAACATTAAGTACGGAGATCC |
| | | CACGGCACTCCTCTCAAGTAATGAGCTGCCTGCGTTGATCTACGAATTGTTAGTTAATAAGAAATCGGGTAAAG |
| | | AATTGGAGAATATTATTGTCGAGAAAATTGTGAATCAGTATAAGACTATAGCTGGGTTCGAGAAAGGTCAGAAT |
| | | TTGTCTAACTCTCTCATAACAAAAAAATTAAAGAAATCAGAGCCCAACGAAGACAAAATCAACGCGGAGAAGA |
| | | TTATTCTCGCGATTAATCGTGAGCTCGAAATCACGGAAAACAAATTGAATATTATTAAAAACAATCGCGCAGAA |
| | | TTCCGCACCGGCGCCAAACGTAAACATATTTTTTATTCAAAAGAACTGGGTCAAGAAGCCACGTGGATTGCTTA |
| | | CGATCTGAAACGCTTTATGCCCGAAGCTAGCCGTAAAGAGTGGAAAGGGTTTCATCATTCAGAACTGCAAAAAT |
| | | TTTTAGCCTTTTATGACCGGAACAAAAATGATGCGAAAGCCTTATTGAACATGTTTTGGAACTTCGATAATGATC |
| | | AATTAATCGGGAATGACTTGAATTCTGCTTTTCGTGAATTTCATTTTGACAAATTCTATGAAAAGTACCTTATTA |
| | | AGCGCGATGAGATACTGGAAGGTTTCAAAAGCTTTATCAGCAACTTTAAAGATGAGCCTAAACTGTTAAAAAAA |
| | | GGCATTAAAGACATCTACCGAGTCTTTGATAAACGCTATTACATTATTAAGTCTACCAACGCACAGAAAGAGCA |
| | | GTTACTGTCAAAACCAATCTGTTTACCGCGCGGGATTTTTGATAATAAACCTACTTATATTGAGGGCGTGAAAGT |
| | | AGAAAGCAATTCTGCCTTATTTGCAGATTGGTATCAGTACACCTATTCCGATAAACATGAATTCCAATCCTTTTA |
| | | TGATATGCCGCGTGATTATAAGGAACAGTTCGAAAAATTCGAACTGAATAACATCAAGTCAATACAGAACAAG |
| | | AAAAATCTTAACAAGAGTGACAAGTTCATCTACTTTAGATATAAACAGGATCTGAAAATTAAACAGATCAAAAG |
| | | TCAGGATCTGTTCATAAAACTGATGGTTGATGAGCTTTTCAATGTCGTGTTTAAGAACAATATCGAGCTGAACTT |
| | | AAAAAAACTTTACCAAACCTCAGACGAACGTTTTAAAAATCAGCTTATTGCTGATGTCCAAAAGAATCGTGAAA |
| | | AAGGCGACACAAGCGATAATAAAATGAACGAAAATTTTATCTGGAACATGACGATACCGCTGAGCCTCTGTAAT |
| | | GGCCAGATTGAGGAACCTAAAGTTAAACTTAAAGATATCGGTAAGTTTCGGAAACTTGAAACAGATGATAAAGT |
| | | TATCCAGCTGCTGGAGTATGATAAAAGTAAAGTTTGGAAGAAATTAGAAATAGAGGATGAGTTAGAAAACATG |
| | | CCGAATTCTTATGAACGGATTCGACGAGAAAAATTGCTGAAAGGAATTCAGGAGTTCGAACATTTCCTGTTAGA |
| | | GAAAGAGAAATTTGACGGAATTAATCATCCAAAACACTTCGAACAGGACCTCAATCCAAATTTTAAAACCTATG |
| | | TTATAAACGGAGTATTACGCAAGAACTCAAAACTGAATTACACGGAAATAGACAAGCTTTTAGATCTGGAACAT |
| | | ATCAGTATTAAAGATATAGAAACCAGCGCGAAAGAAATCCATCTGGCTTATTTTCTGATCCATGTCCGTAATAA |
| | | GTTTGGCCACAACCAGCTGCCCAAACTCGAAGCGTTCGAGCTGATGAAAAAATATTATAAGAAGAACAATGAG |
| | | GAAACCTATGCGGAGTACTTCCACAAAGTATCTTCGCAGATTGTCAATGAATTCAAAAATAGTTTAGAAAAACA |
| | | TTCTTAA |
| 308 | JW13131 | ATGAATAATAATATTTTAGAACAGTCCACTAGCGGTTCTGAAAAACGCGCATCAACACGCACATTGGAAGCTGA |
| | | TCCTCAATATTTTGGGGTCTATATCAATATGGCACGTCACAATGTCTTCCAGATTATTAATGCCCTTACGCACAA |
| | | GTTTAGTAAGCAAATTGAGAACGCAAAGCCGATTAACGACGATGAAAACATCGCTAACGATTATCTGATCAATA |
| | | TTGGTAAAGGGACCGACAAAAGTCCTACAATAATCGAAGTTCTGAACCCGGCACATCCATTACATCGTCTGTAT |
| | | GGTGAACATGTATTTCGGGCGTTAAAACGGTATCTTCCCTTGGTTACGATTTTCGAAGTTCCATCTATTAACACT |
| | | GAAGATATAATCAAGGACACTGATGACATTTTGCCGGTGCTTTTTCAGGACCTGTACGAATTCATTACCTTGCTG |
| | | TTTTACGAACTGGTAAAGTTTCGGGACGCTTACACCCATGCTCTGGCTCTGGACGAACAGGGAAACATTGTGCC |
| | | CCGCAAAATAGATCTCCATCCTAATCTTAGACATTATTTTGAACATCTGTTTTACAAAGCGCCAGATTATACTTT |
| | | ACGGCGTTTTAGATCGACTCAAGAAAAAATTGCCCACGGGTTTCATGAAAAAGACTTTGCTCTTCTTAAAGCAC |
| | | ATAATCTGTATCAGGACCCGCATAGTAACGAATTAACCACTCAGGGCTTATTTTTTTTCACCACTCTCTTCTTGGA |
| | | ACAGAAATATGCCTACCAGTTCCTCAAACGGTTCAATGGCTTCAAAAATGAAACAATCCAACCGTTTAAAGCCA |
| | | CCTTACGTGTTTTTACTGCGTTCACAGTGAAACTGCCGAATGATAAACTTGCATCAGATCACCCTGGGCAATCTT |
| | | TCTTACTGGACATGCTGAACGAGCTCAACAAAATTCCGCAGAGTTTATTCAAACACCTGACACCGAAGGATCAG |
| | | GAGATGTTTGAGAGAATAAACGATGAGGCCCTGACCAATATTCTGAAAAACACAGATGAAGCATCCTTCAAAG |
| | | ATGTTGATGACCTTTTAGGTAAAATGGCCCCGCTGATTCGGCGCGAGGATCGTTTTCCATATTTCGCACTGTGGT |
| | | TCCTCGAACAAACAAAAGCCTTCAATCACATCAGATTTCAAATAAGCATCGGTAAAATTGCATACTCCCCGTAT |
| | | GACAAAACCATTATTGGAGAAACGTCACCTCGGATAATAAAGTTTGATATCCATGGATTTGGTTCTCTGGCAGA |
| | | ATTTTCGGATGAGGATACGTTATTGACCACGTTAAAACGTCAGCTTCCCGCAGGATCTCCACATGCGAGCCTGAC |
| | | CTTTAGTCAGTATGCTCCCCACTACCACATTAAAAATAACAAGATAGGCATATTGGTGGATTATCCGTCCGGAG |
| | | ATAGACCACTCTCGAATATCACCCAGCAGCCCGACGGCAAGATCAAAGTTAACCATATTAAACCGACCGCCTTT |
| | | ATTAGCATCAACGAGCTGCCAAAACTTGTAGTTCTGGCCCTGTTAGGCACAAACAAAGACAACAAACCGATTGG |
| | | CAATGATATTGAACGCCTCATACGCAGCTTTATCACTAAGTTTAAAAATCAGCTTTTTCACCTTGCGCCGTTAAC |
| | | CAAGATCAAAAATGGTTTGACATTTTCACCGGAAACCTTCACAAGACGCATGGATAAAGACAAAATGGTAAAA |
| | | GGTCGTATTCCTAAAAGTGAACTCGCCAAACGTGAAGAATACAAGATCTATCTGGAAAAACGAAAAGCAGTTCT |
| | | GCAGGGTACCACAGACTTGAAGTTGAACGTGAATCAACTGCCTACTAAGATCCAGAATTACCTTCTTAACATCG |
| | | ATGAAGTGTCCGATGAAAAGTCGATTCATCTTCGTATCAAAACAATGATTAAAGAGGTCGAATACCGATTAAAG |
| | | AAAATTGATCGTAATAAGCTGCCAAAAGTGGGAGATATCGCGACGTATATTGCGCGAGATATGCTGGATATGGT |
| | | GGCTGATGTCCGTACAAAAAGTCGCATCACTTCTGCATATTACTCGCAAATACAGAGAGCGCTGGCGTATTTTGC |
| | | TCTGGACAAGACTCGGCTCATTGATCTGTGCGACGAGCTGGGGCTGTTCAACCATCAAACTGGCCACGTTTTTCT |
| | | TATACGGGAGATTTTTTTGAACAATCATCATATATTAGGGGTCTACCGTGAATATCTTACCAAGAAACAGAACTG |
| | | GATCGACCAAAATCTGATTGTTAAGATCCAGGAGCGAGGTAAACGTCTGACGAAGTATATCCTGCCGACTAATC |
| | | GCCCTTTGCCCTATAAGATGAAGCAATCAATTAATAAAGGCTTCGAATTCAATGCATGGCTGCAGCATAAAAGT |
| | | ACGATGCCAATCGATCTTCCTACGACGCTCTTTGATGAGTCTCTCACCAGCTTACTGAAAAAGACGATTGCTCAG |
| | | AAATTAGGGATAGCGTCAAAAAGTGAAGATAAGTTTGGGCGCCTGTTAGATCGCCTGTTGAAACAGGACACCCA |
| | | GCCATTTTACAAATTTGAACGTATCTATCGCAAACCTTTCTCACAAGAGGAACCGGAGCCTTTCAATATCTTAAA |
| | | ATTAACGCACACCGCACTGAAACAAAGATTTGGCAAACCGGCTGAAGTGAATGAGAAAATTATTCGTCACCATC |
| | | AGCGTAAGGATCAAATTGTACGCTTAATGTGTGAACACTTGTTTAAAAATAACTCTGAGTTGGCCTTCGAAGGC |
| | | GAGTTTCTGCTTGAGAATCTCCATCCTGCGAGCCGTAATAATCCGTTAGATGCGCCCATGGTCTTTGAGCAGACG |
| | | ATTCCGCATACGCACAAAAAAATCGTGGCCCAGGACTCCAATAAGTGGATTCAAGAGGTCAAAAAAACTAATA |
| | | ACCGTAACAAGGCTTGGTATCGATGGACATTAAAAGACTTTGGCACGTTTCGGAAAATTATACATGATCGTCGC |
| | | TTACCCGCCTTGGTCAATAGCATAACCGGTGATGAAATAGATTTTGATCTGGTGCAGTTCGAGCTGGCCGCCTAT |
| | | GATCGGGCACGTGAGACCATATTTGATCAGCTGTTTCTGTTGGAACAGTTCATTGCGGATAAGGACATGTCGTAT |
| | | ATCAAGCAGCATAAAGCGATAGAGCGCATGCAAGACGGAAAAGGCTTTGATGAAGTTCAATTCAACACCTATG |
| | | CAGACTGGTTAAGCGATAAAGGATTATTGACACCAGATGAGATTAATGGTCTGAAAGAAATTCGAAATCGCTTC |
| | | TCTCACAACCAATGGCCTGGTATCTCCAAACTTGGTATTCAGCCAATAAGCCAGGAACAGCAGTCAGCTTTTGTA |
| | | ACCCATCTGAATATTAAAGGTTGGGTTAATGAACATCATACGCCCCTCGCCATGTTTATGGAAAAACTGGTAATT |
| | | AACTGGGTGTCAAAAGCGATCACATAA |
| 309 | JW13132 | ATGAAAATCAAAAACGAAAATACCGACAAGAAAACCGAGTTATACTCTATAGATAAGTATAAGGGACGGGATA |
| | | AGTGGTGTTTTGCAATTGTGCTGAACAAAGCTCAAACAAATCTTACGGAAAACCCTGATCTGTTTGAACAAACA |
| | | ATTACGAAGTATGACCGCATTCGTAAAGAAGGTTGGTTTGATGAAGAGACGAAGAAATTAATCTACATTCAGGA |
| | | AAATGAGCATAAAATCAAAGGCGAAATCAAGACATTAGCGCGCGAAGTGCTCAAAAACCTTCGGAATTATTTC |
| | | AGCCACCATTTTTACAAACAGGATTGCTTAATTTTTCCTAAAGATAATATAGTGCGAATTATCATGGGTCGTGCG |
| | | TATGAGCGCTCTGAATACGAAATTAAGAAAAACCTTAAAGAAGACATCAGTATTGAGCTGCCGGCTCTGTTCGA |
| | | GCCGGAAGGTAAAATTACCACCGCTGGAATTGTTTTCTTTACCTCTTTTTTCGTGGAGCGCCGGTTTCTGCATCGC |
| | | TTAATGGGCTCAGTTCAGGGGTTTACAAAAACAGAAGGCGAATATAAGATAACACGTGATGTCTTTGCGAAATA |
| | | TTGTCTGCGTGATTCTTATTCTGTTAAAGCGCAGGATAATGATGCGGTTATGTTTAGAGATATTATAGGTTATCTT |
| | | AGTAGAGTTCCAACAGAATCCTTTCAACATATTAAAAATCCAAAAAAACAGAATGAGAGCCAGCTGTCCGAAC |
| | | GAAAGACGGATAAGTTCATTAGTTTTGCCTTGAAATATTTGAAAGACTATGGTTTTGAGGATCTTAAGGGCCATT |
| | | ATACCGCATTCTTTGCTCGCTCTGAAATCAAAAAAGAAAAAGAGGATATTGAGATCAAAGATGACAAAAAACA |
| | | CAAACCCCACCGGATGAAATCGAAAATAGAAATTCACTTCGATAAAACCAAAGAGGATCGTTTCTACATAGAAC |
| | | GAAACAATGTCATTTTAAAGATTCAACGTAAAGGTGGACGTGCAAATATTCTGCGTATGGGAATCTATGAACTT |
| | | AAGTACTTGGTGTTGTTATGCCTGAGTGGTAAAGCCAGAGAAGCCATTAATCGCATCGATGATTACCTGAATGA |
| | | TCTTCGGAATAAAATCCCGCATATTGAGAACATGAATAAAGAGGGGATCGGTGAACAGATTCGTTCGCTGCCGG |
| | | GTTTTGTTAGATCCCAATTAGGTTTCGTTCAAATAGACGATGAAAAAAAGAAAGAAAACCGTTTGGACTATGTA |
| | | GAGAAAAAGTGGGAAAAAAAACGTGCCGAAAGTAAAGAACTGAAACTGAACCGCAAAGGCCGGGATATTCTG |
| | | CGCTATATTAACGAGCGTTGTAAAAAACCTCTTACTATCGATAGATATAATCGCATCCTGGAGTTGCTGGTCGAA |
| | | AAAAACATTGAAGGGTTTTATCATGAGTTAGAAGAGCTCCGGAAAACTGGCAGAATCGAAAAGAATATAACTC |
| | | AGGCACTGGTAGGTGAAAAGAATATCAATGCGCTGCATATTAAGATATGCAAACTGGTGCAGGATGAGTTAAA |
| | | ATCATTAGAAAAAGAAGATCTGAAAAAGTACATTGGGTTAACGCCAAAAGAGGAGAAAGTAGTTAGCTTTGAA |
| | | GAGAAATTAGGTCGCATTCTTGACAAGCCCGTAATCTACAAGGGCTTTTTACGTTATCAGTTTTTTAAAAACGAC |
| | | AAAAAGTCATTCGCACGACTCGTAGAAGAAATCATTAAAGAAAAAACGGGCGGATTAGACGTTCCAATTGAAA |
| | | CTGAGTATTATTCCATATCAACACTGGGGCGCTTTGATAAAGCAAACAAAACTCTCTATGAAACTCTGGCTATGG |
| | | ACCGTCTGTGCATGATGATGGCCAGACGCTATTTTCTGTCGCTGAACAAAATCCTGGCGAAACGTGCACAAAAT |
| | | ATTGAATGGAAGAAAGAATCAGGCAAAGAATTCATAGTCTTCAAGTTTAATATGCCTCAGGATACTGGAAAAAG |
| | | TATAAGTATTCGATTTTCACCGAAAGATTATACCAAACTCTACGTGAAAAATGACTCAGAATTTCTTGCTCGCCT |
| | | TTGTCAATACTTTTTTCCCAATGAGAAAGCCATTGACTACCATAAGCTCTATAGCCATGGGATCAATAAGTATAC |
| | | CAATTTCCAGAAGGAAGGCATTGAGGCCATTTTGGAATTGGAAGAAAAAATAATTAAGAAACGGAAGATCAAT |
| | | TCGCCGGAGAATTATTTGAGCTTCGAAGAGATTTTGAACCAGTCTATCTACAACGACGAGGAAAAAAACACCCT |
| | | GATCCAGATACGTCACTCCCTTCTCCACTATCAGATCCTCTTCAGCAAAAACGACCTGACGAAGTTCTACAATGT |
| | | CATGAAACGCGAGGGGATTGAAAAAATATGGAGCCTGGTGATATAA |
| 310 | JW13133 | ATGGAAAATCTCTCAAAAGAGCAAATTGTTGAAACTCAGGAGCAGAATAAGCGCACCTGGGGTAATGATCCTC |
| | | AGTATTTTGGAGCATATCTTAATATGGCTCGTCTGAACATCTACAATGTTTCTAATCATCTGGCCGAAAAATTTG |
| | | GTATCACAGCAATTGAGAATGAAGAGCAAATCAGCAACTCATTTCTTGGGGACAAAGAGAACAAAGTGTTCAA |
| | | AAACAAGCAGAATCATATTTTTTCCAATCTGATACGCTATCTTCCAATCGTTAAGGTATTTGATTTCGAAAAACT |
| | | GCCGGAAGAGGAGAAGATTAGCTTGAAAGATAACTTCGGAAAAGACTTCAAAGAGCTTTCGGATACATTAAAA |
| | | ATAATTTTTAGCGAGATCAATGAGTTCAGAAACGACTACAGCCATTATTTTTCTACCGAAAAAAAGAATAAACG |
| | | CAAAACCAAGGTCTCTGATAAACTCAAAGATTTTCTCAACATTAATTATACGAGAGCAATTCAGTATACGAAGA |
| | | ACCGTTTCATTAATGTGTTCTCAGATAATGATTTTTGTTTAGCCGAAGAAGCAAAACTGGTCGAAAATGATAACA |
| | | CCATTACTCAAGATGGTATCGTATTCTTTACGAGTATGTTTTTAGACCGTGAAAATGCATTCCAGTTCATTTCTAA |
| | | AATTAAAGGTTTAAAGGGAACTCAGACCAAAGCGTTTAAAGCTAAACGTGAAGTTCTGATGGCCTTTTGCATTA |
| | | ATCTTCCACATGACAAGTTTGTTAGCGAAAATACAGAACAAGCCTTTAGCCTGGAGTTAATAAACGAATTAAAC |
| | | AAATGCCCGAAAACGTTATACAATGTGATTTCTGAAAATGAAAAACAACACTTTTTACCGAAACTCGAGGATGA |
| | | ACAGATCGATAATGTGCTGGAAAACAGTGTTCCCTACACGATTGACGACTATGAGAACTATATCGAAAATATCA |
| | | CAAAAAAAGTGCGAAATAAGAATCGCTTTTCGTATTTTGCACTGAAATTCATAGATCAGAAAGAGCTTTTCAAA |
| | | AATTGGAAGTTTCAGATTGATCTGGGTAAAGTGGTCTTAGATGAGTATACGAAAACTCTGCAAGGCAAAGACGA |
| | | AACAAGAACTGTAGTTGAAAATGCCAAAGCGTTTGGGAAACTTCAGCACCTTAATGACGAAGAGAATGTCTTAA |
| | | ACAAAATTAATAAAAGCGAGTCGAAGACTCATTTTGAGCAATTTGCGCCTCACTACAATTTTGATAATAATAAA |
| | | ATAGGTATTTCCCGGAAAGAGGATTCAGCGATTTTTATCAGTCGGAATACCGACAAAAAAGTTAAGTTTAATCT |
| | | GAAACAACCTCTTCCAGAAGCTTTTCTGTCAATCCACGAATTACCCAAAATTATTCTCCTCGAGTATCTGGAAAA |
| | | TGGTAAAACCGAACAACTGATTAATGATTTTATCGAGATCAACAATTCCAAAATCCTGAACAAGAAGTTCATCG |
| | | AGAGCATTAAGAGTAAGCTGACAGATTTTAATACATTCAATAAGCGCTCACAGGGCAGAAAAGAGAAATCAGC |
| | | CTATAAGAAGGAAGCTCTCAAATATTTGCTGGATCGTAAAGAAAAGCTGAACCAGATTTTAGCTGAGTACAATC |
| | | TTAATGTAAAACAAATACCGACGCGGATTCTGGATTATTGGTTAAACGTGGCTGATGTCCAGGAAAAAACCGCG |
| | | ATATCTGACCGCATTAAACTGATGAAACGGGATTGTATGGATCGTATCAAAGCTATGAAAAAAGGAAAAGCAC |
| | | CTAAAATAGGTGAAATGGCAACCTTTATTGCAAAAGATATCGTGGACATGATTATTGGCGAAGAAAAGAAGAA |
| | | AAAGATTACCTCTTTTTACTATGACAAAATGCAGGAATGTCTTGCGCTTTTCGCGGACAAAGAAAAAAAGGAAT |
| | | TGTTCATTCATATATGCAACAATGAGTTGAAACTGAATGAGTCAGATGGCCACCCGTTTTTGAAAAACATCATTC |
| | | TGTATGATTACCGTTATACCTCGGATCTTTATCGTCGATATCTGGAAGAAAAAGCCGATAACCGGAATAATCTCA |
| | | ATAAAAACGATACATCGTGGCTGGCCAAAAATTTCTATTTTATCGAAAAAGTGGAAGTATTCGATAAACGACTG |
| | | AACCGCATGGAATTCAAGCCGCAGACAGTAGTCAAAATCAAAGACAAAAGTAAGATACCGTTTACCCTGCGTC |
| | | AGTTGGAAAAAGAAAAAAGTAGTTTCGATACGTGGTTCGAAAATATAACGAAAGGCAAAGAAACAACTGACAA |
| | | AAAAAAGCCTGTCGATCTTCCAACCAACCTGTTTGATAACTATCTGAAGGAATTATTGATTAAGGATCTGTCCAA |
| | | GAACAATATTAAGTTTAACCCAAAGACTAATTACAACGAGTTATTCAAGTTGTGGTGGAAAGAATGCAGAAAAG |
| | | ATAAAACTCAGTCCTTTTACAATGCGGAGCGTGAATACTCCTTTGAGGACAAAAAACTGAACTTTAAGATAAAC |
| | | ACGAAGTCCAAGTTTGAAGATTATATCAACCCCGAATTTGCTGAAAAAGTTTTTAAACTGAAATCTTCTCGCCGT |
| | | GAAAAAGAAAATTCTACCGGGCGCAAACTTCCGCCTCTGATGATTAAGGATTTGGAAAAATCAATGGCGAACA |
| | | AAATTGGGAGTATAGAAAAAGACATTCGAATTTTACAGGAAGATGATTGTATGATGTTGCTGATGTTCGAGAAA |
| | | CTCGTTGATAATAATCTGGAACTGAAACTGGAGAACGTGGACACATTGATGAATGAGAGCATTGAAATCAAACA |
| | | AAGCATATTGGGAAAACTGAGTTTTGACGACTTTGGGGACAACGTAAACAAAAATGATCGTATTATCATCAGCA |
| | | AAAATATTACTGAGACCCGGAAACGTAAAGAGTATTCAGTTTTAAAAAAATATATTTTCGATCGCCGCTTACCC |
| | | GAGTTATTTGAATATTTCGAAACGGAAGACATTACCATGGAGAAGATAAAGTTAGAACTGGGTACTTATAACAA |
| | | AGCAAAGGATATCGTGTTTGACTTGATATTCGACTTGGAAAGTGCCATCATCAAAAAAAACGAAAACCGGATAA |
| | | AAGAGCTCAACAAAGATAAAAACGGCAACATCCAGACGGGCAACATTCAACATAAACCGTACCTGTTCTGGCT |
| | | GCTCGAAAAAAATCTTATAACTGAACAGGAGTTCACCTTTCTTAATATGGTTAGAAATACATTTTCGCATAATCA |
| | | GTTTCCACAAAAAAAGACAATGGAACTTTTTATCAAGAATTGGAATAAGAACGAATACGCCAAGCAGATACTG |
| | | ACAGTCTACACCGAAAAGATTAACAATCTTATCGAGAAAGTTATTGATATATGA |
| 311 | JW13134 | ATGGCTGTGAATTACAGCCTCAGAGAAAAATGGTATCGTGGAGTTAATAAGTGTTGTTTCACAGTAGCACTCAA |
| | | CATTGCAGTAGATAACTGCAAAAGTAAGGGGTGCGAAACCTTACTGAAAGAGGCGGAACATTCTAAAGGTGGC |
| | | ATAACCGATGAACAGATTCAGCAGAGTTATACGGAAGTTGAGAAACGCCTTAACGATATAAGAAACTATTTTAG |
| | | CCACTTCTATCACGGGGATGAATGCTTAATATTCAAAAAAGACGACATCGTCAAGCGCTTCATGGAATCTGTCTT |
| | | TGCTACTGCGGTGAGTAATGTAGTGGGCGGTACTAAAGAATCAGATTATAAAGGTGTTGTCCCGCCCCTGTTTG |
| | | AACAATCCAATGAAGATTATATGATCACTGCGGCCGGCGTGATCTTTTTAGCCTCGTTCTTTTGTCATCGCTCAA |
| | | ACGTTTATCGTATGCTTGGCGCTGTTAAAGGTTTTAAACATACCGGGAAAGAAGAACTGTCTGATGGTCAGAAA |
| | | AGAGATCATGGTTTTACTCATCGTCTGTTGGCCCACTATAGCCTGCGTGACTCTTATTCAGTTAAAATAGAAGAG |
| | | ACCAAAAGTTTTCGCGACCTTCTGGGTTATCTTAGTCGAGTGCCTCAACAAGCTGTGGATTGGTTAAACGAGCGT |
| | | AACGAGCTGTCGGAAGATGAGAAGAAAGAGTTCCTGAACCAAAAAAGCAGCGAAGAGGAGTCGCCGGAACAG |
| | | CCTGAACCGGAAAATGCCGAATGGCGTACTGAAAAGACAAGTCGCCGCTCATTACGTAAAACGGAAAAGTTCA |
| | | TTTTATTCGCCGCTAAGTTCATTGAAGATAGAGCTGAAAAAGAAAAACAAGATGTTACCTTTGCGCGTTACCAG |
| | | AAAACGGTAACAAAAGAAGAGAATAAAAATCAAGACGGAAAACAAGCCCGCGTCGTGCGATTGAAATATGAG |
| | | GAAGATAAAAAAGATGATGAAAAACCGCGCGAACATTTCAACCTTGAGTGGATGTATTATATTCGCAATGAACA |
| | | CGCAATCATCCAGATCAAACCAAAAGATAAAGAGGCCGTCGCAGCACGTATATCTGAAAATGAATTAAAGTAC |
| | | TTGGTGCTGCTTATCTTCGAGGGAAAAGGGGGAGATGCTTTTAACAAGCTTAGCGACTATATTTTTCGGATGACA |
| | | CAGAAAATCAAGAGTGGCCAAATCAATCCCAATGAAGCGCGGCTCCCTAGCTTTCTGAAAAACCCAGTCAAAA |
| | | ATATTACGGACAAAATGGTGCGAAATCGTCTCGACTATATTCGAGGGCAGATCAAAGATGTGTTGGAAAAGATT |
| | | AATATGGAAGAGCCGCAGAACAACAAGTGGCTGATATACAAAGGCAAGAAAATCAGCCTCGTGTTGAAGTTCA |
| | | TCTCGGATGGGATTTCAGATATTAAAAAGCGTCCAAACGTGAAAGAGTATGATACCCTGCGGGACACATTACAG |
| | | AAACTGGACTTTAATCGTTTCTACGAGCGGCTGAAGTCCTACGTTTCCGACGGTCGTCTGGCTGCGGCGCTGTAC |
| | | GATAAAATCAAAGGGATTGATGATATTTCTGAGCTGTGCAAGAAAGTCTGTGAACTCATGTTTGCACGCCTGGC |
| | | CGAGTTAGAAAAAAAAGGTGGATTTGAATTGTATCGCTACATCGGAATGGAAGTTCAGGAAAAGGATGAGAAA |
| | | TACGATGAATGGAATTCCCCACAGAAGAAAGCCGAAAGATTTCTGGAGAGTCAGTTTTCAATAGGCGAGAATTT |
| | | TCTTCGTGAGTCCTTTTATTCGGAGTACTGCCAGAAACAAGAGTGCATAGATAAAGAGATTTCCCTCAATACAA |
| | | GCGTAAAGAATCGGAAGAGTTTGGTATACATTGTGAAGGAAAAGTTGAAAGACATTATGCCTCTGCATAATGAC |
| | | CGTTGGTATCTTATCGATCGAAATCCGAAAGATTTTGAACGAAAGGACTCAAAAGTTATCAAAGGCCTGTGTAA |
| | | TACGTATGTACAGGATGTTCTTTGTATGAAAATGGCGAGATGGTATTATGGTCAATTAAACCCAGCGCTGAAAA |
| | | ATAACATTAAGTGGGATGAAACCGGTCAAGGACATGGTTATGACCGTTACAAACTTTCCTATCGTACCAACTTC |
| | | GGAATTACTATAGAGTTCAAACTGGCAGACTTCACACGGTTAGACATTATAGAGAAGTCAGATATGATAGAGAA |
| | | CATCTGCCGCAGCTTTATTAAGCCGAATCGCACGATTTCTTGGTACGATTTTAAACAGGATGGTGTTGAAGAATA |
| | | TAGAAAACGTCAATATAAAGCAGTACGTGCAGTTTTTGCATTTGAAGAGTCGCTGATTATTCCGGGCCGGGACT |
| | | GGCTGTCTCAGGGCTTTGTTCCCTTTATTAAGAATGAAGAATACGTCAAAAAAGGCTTCAGCCTGTTCGTATTAG |
| | | ATGAAGCTGTTCGGCAGTTAAAAATTAAAGGTTCTGACAAAGACGCCATGCGCCAGGTGCGGAATGATTTTTTT |
| | | CACGAACAGTTTCAGGCGAAAGATGAACAGTGGAAAGTCTTTGAAGGCTACTTGTCATGTTTTATGATTGATCG |
| | | CCCTAAAGGTGAAAAAAACAAGAAGAGATATAATGGGAATAAAAAATAA |
| 312 | JW13135 | ATGGAAGAAAAAGAGAAAATTTCTATCCAGACTATTCAGGATGCTCCGTATTATTTTTCTCATTATGCTAATATG |
| | | GCGCGACACAATGCTTTCCTGATTGTGAATGAAATTAATGAAAAGGTCTTCCAACGTTCAGCAACAAAAGAGGA |
| | | TGAACTGCTGCGTGAAAGCTTTCTGGTTAAACCGCCTAGACAGCAGGCTGATATTATTGGAAAAATAGACTCAT |
| | | TATTACTTCACCATTTTCCATTTCTCGCCTATTATGAGAATAAAAGTGCCGGGTCGGCCCGTGTCGAGTTAAAAA |
| | | AATACATGGACATCTTAAACCAATTTCGCAATGAGGTGACACACTACAAGCATCCAGTTGAACCAAAGTGTATC |
| | | GTCAATCTTCAGGAAGTGTTTTCTTCAGCCGTGGAAAAAGTCCAGGAACGCATGATTGCCTTTTCTGAAAAAGAT |
| | | TTTGAGCATCTTAAACCGAGCTCAAGTGACTATCGTCATTATATCTTAACGGAAGCCGGTATCAATACCTTGACT |
| | | GACACGGGTCTGTATTTTTTTCTGTGCTTATTCCTGGAGAAGAAGTACGCGTATAAGTTCTTGGCCGGAATTAAG |
| | | GGTTTTAAAAATAACACAGACCATACACACAAAGTCGCATTGGAAGTTTTTACGCAATTTTGTTGTCGTCTGCCA |
| | | TATTCTAAAAGTGCATCCTCTGATATTGCACTGGATATGCTGAACGAACTGAACCGATGCCCTAAAGCGCTGTAT |
| | | CAGGTAATAGATAATGAGCAGAAAGAGCTCTTCACCGTCAAAAAAGAGGATATTGTGGAAACCGAACAGGGTA |
| | | CCGAGGATGTGCCGGAACCCGTTATGATTCGTTATGATGATCGCTTTCCGTATTTTGCTTTACGTTATTTTGACGA |
| | | ATCAGAAGCTTTAACTGATATCAGCTTTCAGCTGTATCTGGGGAGAAAGCATAAAAAAGAACTGCACCGCAAAA |
| | | AATTAAACGGCGAAATGCGAACCCATAATCTTTTGAAAGAAATGCATGTGTTTGGCAAACTGGCGGATTATCAA |
| | | ACAGAAGAGATGACCAAAAGTTTTATTGAATCAAAAGCAGTTGAGCACTATGCACCGGGTTATAGAATTGTAAA |
| | | CAATCGCATTGGGGTTTTACTGAAAGCACCCGAAAAGTGTTCCCTGACGAGTAGTATTCCGCAAAAAACAAATA |
| | | CTGCGCCGTCTGCAATACTGTCAACCCATGAGTTAGCAGCCTTGTATCTTTATAATAGACTGTACAAACAAGGGT |
| | | CCGCTGACAATTCCCCAGCGTCTATCATTAAGAAGTATATCGAAAACTTCAACCGCTTTATCAAAGACCTTCAGT |
| | | CGGGAAAAAGTCAACCTGTAGAGAGCGGGGGATTTCGTCGCATGCGGAATAGTAATAGAGATGAAGAAGAGCG |
| | | TCTGAAATTACAGAAAGCTAAACAGGAGCTGCAGAAACAGTTGGATGTTTACGAACTGAAAGTGTCTTACCTTC |
| | | CGGATGCATGCTTAGAATATCTGCTCTCCTATAAGAAAGATAACAAGGAATTCATGTTAAAAGATACGTTCCGG |
| | | AAAATGTGGAAGAATGCAGATGAAGGTTTGGAGAAAATTCGTAAAAAAGAGGAGCAAAAGAAAGAAGTGAAA |
| | | CAAGAAAAACTCGCGCAGGAACTGGCGCAAGATTTTGTGTATCTGACACCGCCACATAAAGAATTGTCAGAAA |
| | | ATGGCACGGAAAAATCCGTAGACAAAAAAATTAACAACATGGAATTTGACGTGCTCAAAAACATGCTGACCTA |
| | | TTTCCCGCTGTACAAGAATCGTTTAAAACCATATCTGAACATACTGAAAGATACTGAGAACAAGTGGCAACACC |
| | | CCTTCCTGCATCTTGTCCTGATCTACGATTTCGATTCCTGCAATTCATTGAAGGATTTCTATGTGCGTTACTACGA |
| | | ATACAAGAAAATATGGATTAACAAGTTCATCCAACAAGATAAACGGAAGCGGTGGAATCTTGTTCCAAAACAG |
| | | AATGTCAATGATCTCATTAAGAAATATGACTACTTTCTTAAGACCACGGTGAAGTTTAAGAGTGCGAAGGAGAA |
| | | AGAGTATTCTAAAGATGCGATATTTCTGCCTAAGGGCTTATTTGATGCCCATATCGCTGAGGCTATGAAAAAAC |
| | | AGAACTATGAAGTTAAAGAAACCGACAACGCTGCCTATTTTTTGAAAGTTTACTTCGACGGTAAAAGCCAGAAT |
| | | TACTATAGTCTCCCCCGCTACTATGACGCGTCAGCAGTTGGCTGGCTGACCCATGAAGCGCGGGATATTCTCAAA |
| | | CGAAAGATAGAAGAGACTTGGGAAACCAAAAATGACGAGGAGTTCCGCAATAAACTCAAAAAGTTAAGCAAA |
| | | GATATTCGGGAGTCGGAAACAGAACTGTTGCATCAGCAGACGAATGATCGCACTTTATTTCTTATGGTTAATGAT |
| | | TTGCTCAGCGGCAACACTAACAACTACAAAGACATTGTAGATCTTGGCTACAATAACAAGAGTGAAAACTCGAT |
| | | TTTGAACAAGCTGTATCCTATCAAAGAGACCATACACGACAAGATTGTCACTGCAGAACTTCCTATTAAACGCT |
| | | ATGGTGAATTCAAACGCTTTATGAAAGATAGACGATTACCCGATCTGCTTGGTTATTATGGAGAAAAAGAAATA |
| | | CCTCTGAAAGTACTGGAGACGGAAATGGAAACCTATGACCGTATGCGGAAAGATGCCATAGAGCAGATCTACA |
| | | ATTTCGAGAAATTGATCTATGATAACTTCGAGTCGGAACTCAAAAAAAGCGTAGACCCGTCGGCCTTATACATT |
| | | GATCATAATCACTACCTTAACTTTGTAAAGCAAAAGTTCAAATTGGAAACTGTTATCACTGAGATGCAGAGCGA |
| | | ATCTTTTAGAGAATTACGCAATAAAATAGAACACAATCAGTTTCCGCCTCGTGAAGACTGGATAATCGACAAAA |
| | | TTAGCCAGGATACGACAACGACAATAATCACAGAGAAAATCATGAATCTTATCTCCACCGAGTACAAAAAGATT |
| | | TGGCGTGAAGTTGAATCAACAACCAGCATTAGCGATATGGAATAA |
| 313 | JW13136 | ATGAAATCTCCATCGAAAAATCCGCGGTCCGAACAGGCGGTGGATTATGACTTCTTTGTCGGTGGTCGTTCCAA |
| | | AAGTGCAGATCTTACCATCTACTACAATGTCGCCTTTGATTCTGTTGTTAAGATCAAAAAGCAGATATCAAACTG |
| | | GCCTGACAGCCGGCAATATGCGTTTTTAGCTGAGTATCTGTGGAAAGCGCATTACCTTCAAAAAAATAGTAATG |
| | | GCTATGAGGTGCAGCCAATCGATGAATGGATTATACAAGCCCTGATTGCTAAAGTTGAGGCGATCCGTAACTTC |
| | | CATTCTCACATTTGGCACGATCATGAAGTGCTCATCTTCGAAAAAGAACTGAAAGACTTTGTGGAGCAGAAATA |
| | | CGATGAAGCGAAAGCCGCACTCAGTGCCGAATTTCCGGGAGCAATGCTCGAGTACGAGGATCTTGCGCGCACCG |
| | | GTCGCATGAAGAAATTTTCACTTTTCAAACGTGTTCCTGAACGGAAAAAAGACTTTATTACAGTTGAGGGCCGC |
| | | ATCTTTTTCCTGTCCTTCTTTCTGTCTACCGGGGAAATGAACCAGTTACTGCAACAGCGACGCGGCTTTAAACGT |
| | | AGCGATATGCCACTTTTCAAAATGAAACGCCTGTTGTACACCTTTTACTGTCACCGAGATGGCGCCTCGATGTTG |
| | | GATTTCAATCATAAAGAACAATTCATAGATTCTATGGATGAGCAGCAGAAACGTGACATCTTTAAGGCCCGGAC |
| | | AGCGTATAAACTGATTAGTTATCTGATTGATTATCCCTGGTACTGGGGTTCCAGAGACTCAATGCCACTGTTTGA |
| | | TGAAAAAGGAGAGATTATTCGGAATGTTGGCCAACTGAAAGATTATCTTGAGAAAAATCCGCACCTGCTCCCGG |
| | | AGCTTAACTTTCATCTTTTAGATCGAAAGATCCCTGCAACTGGCAAGTTTAATACTCGCAAGGAAAAAGAGAAT |
| | | TTTGCAAAACTGCAGGATGATAGATATAGATTAGGAACAATAGCTTTTAACTATCTTCCTATACCCAATTATACC |
| | | TTTCACATCGACTTTGAAACGTTACATCGATTGGTATTGCTGCAGATTCTGCATCACGGTTCTAAAAAAGAGGTT |
| | | TCACCGTATCAGGTGTTAGAATTGAACTTACGGAGCATAGTGGAGAACCGTGTAAGTCTGTACAACATTCTGTG |
| | | TAAACAGGATAATGAGAGAACGGGGGAAGATCTTGACTTTCTGTTAGACCGCAAAAATCAGAGACTGAGAGGT |
| | | GGCCGCAAGCTGACCGAATTTGGCATCAGCTATTTTGAAAGTATTGAAAAAGGAAGCGGTGCTAAAATTCGTGA |
| | | TAGTATCCAGCTGGCTAACTATATGCGTTCGATGGATACAGCATGGTTAGAATTACCTTATGAAGGAGCCCATA |
| | | AAGTTGAAATTCAACCCCTGGATCCGGAACCGATTATGGTATACCAACAGGATTTTTTAGAAGGCACCACGCAG |
| | | AAATTTCGCGCCGGAAATCGTTTTATGTTTTACGTATCTCGGTATCTTATGGATTTCGCAGGAGACAATTGGTAT |
| | | TGGGGAATGGAACGTTTTGAAATGCGTAAAAAAGATCAGAACGCCCGAAGCGAAAGCTTGATTCGCACTAAAG |
| | | AGTACCTTAGAGCATCCGATATACCTCTGAACGGCGATTACCGCTTAACTCTGGATAACGATCATATTTTCTTAG |
| | | CGATGCCGAAGAATGGTCCGGGCAAAAAGAATCATGAAAAATTTTACCAATTTGCATTAGGTCCGCGTGCCATG |
| | | CGTTATCTTGGTGCCTATATCATTAACAATCGTGCTGACTTTGTTAGCAAGGCGAAAGGATTTTTGGATACATTA |
| | | GTTCGCGATCTTGACCGTCTGCACAAAAATGAATACTGGAATATGGAACATGGGTACGAATTATTGGAATCCCC |
| | | CTTCGTTTCAGGGTTTCTGAAGAACGTTCCCACGAATATCGAGAAACTGTTAACGCTCGTTAAGACGCGTATCGA |
| | | GTATATCAAGCAGGAGTGGCAGCAAGCTCTGGAAAATAAGCCGTATCTGAGTCGCGCGCAAAAAAACAAACTG |
| | | ATAATGGATGCATATCGTCTGTTACAGTGGCCGAAAGGCAACGATGGCAATCCACGTTTTTTTCGCGCCCATGA |
| | | ATACAATCAGATGTCGGTATGCCATTATTCTCTCCATTTGAAGGACAACGAGCAGGATAAAGAGTCGCGGAAAC |
| | | AAATTAAAAAACGCTTCAAAAGTAAGTATGACCACCTGTTCGAGGACGTCTTCAAACTGAATACTCGTAAACCG |
| | | CCTATTCCTCGCTCTATTCTGTCACTGCTGGACGAGGCAGATTCACTTGACGAACTCATGAAGAAAACCTTTGAG |
| | | GAGTGTCACCAGCTCCTGGATAATCGTTATTCACAACTCAAATCGTTACCAAATCAACAGCTGAAACGAGAATT |
| | | ACCTGAGCTGTGCCGCCTGTTAGGAATCTCAGTGCCGTTAAACATCCTGCGAGAACAGGAAAAAAAGGCCCTGA |
| | | AAGAGAAGCATAATACGACTCTTTGCGTAAAGCCGTTCGATATCCATCCCATGTTAGTTGTGAAGTACTTTTTCC |
| | | CAGAACAGTATAAAGCAAGTAAAAGTGTAGAATTTGTCAACAAGAATGGTGAAAAAGTAAAGAAGCAACCAAC |
| | | CTTGACGATTTTTTCAGCGCTGCGTAAAAATAGAGCACTGAGAGAAAAACTCGTGGAAGACTTCTACGACGAAC |
| | | AGAATAGCGCTGTGCTCTATCCCGACGATGACACAAAAAAACAGAAAGAGGTGCTGACAGGTTTGATGAACAC |
| | | AACTTGTACTGAAGACATACTGTTGTGGTGGATGGCTAATGAATATCTTGTCAATAATCCCTATACACAGGCTAT |
| | | GGGTGAGCTTTTAATGAAAAAACCACGTTCCGGTCGGCAGTATATTGGGGATCTTCATAAACTTACCATTTTACA |
| | | ACCGCTGCCAAAGGAAAGCGGGAAACGGCAAATCTACATGAGTATTTTGATGCACCAGTTGGACGACCTTATGT |
| | | TCATTGTCCAGAAATCCCGGTTAGGCAAAGCGGCGGAACATTTTGTCCAGCGTTGCTCCACCGAAAATGGGATT |
| | | TGGGCTCCGGAAATTGAAAAATTATCAACCAATCAATTGGCAGGGGCTCCTTTTCCGGATGGTACCATTAACAA |
| | | CCCTATTCCTTTTCAGCTGCTGCTCGATGAGATTGAACTGGTCCGCCGTACTGGCCTGGAATTGGGTAGATATCT |
| | | TTTGGAATTCGAAAAGAAGATACTGCAACAGGCATTGAACGGCTATGAGAGCAAAGAAGCGTTCCATAAGTGG |
| | | CTGAAGAATGAGTATGAGAAAACAGAGTATTATGGGAAGTACCCAGCCTATTTCTTCAATTTTGATAGCATACT |
| | | GAAGCTGTCTGGGACAGTGGACAACAACATAGACAAAGATCTCAACATAACGTTATCTGATTATCGCAACATCA |
| | | CGTTCCACAACGATATCCCGTCGAATGGTAGCTTTAGCTGGTTAACTCGGGAAGGTTCTTCCGTGCGTCAGTTAC |
| | | TCGGTATAGAAAAAAATTTGCATGAAAAACGTGATCGCTCAGAGTATGAAAATAATCGTGAAGAATAA |
| 314 | JW13137 | ATGGAAAAAGAACAGGGGTTATACAGTATTGATCGCTATCAGGGGGCTGGGAAGTGGTGCTTTGCGATTGGTGC |
| | | AAATCGAGCTTGGGATAACTATAACGAACGACCAAAACTTTTCTCCGAAAGCTTATTACGCTATGAAAAAGCCA |
| | | CTCGTCGTGACTGGTTTGACGAAGAGACAAGAGGACTTATCAAAAAATCTGACGTTCGTCAGCGGCTGCGTAAA |
| | | ATCCGGTGCTATTTTTCCCATTATTGCCACGACAATACCTGCTTAGGCTTCGATCCGGATGACGATCTGCGGAAA |
| | | ATTATGGAGAAAGCGTATGAGCGTGCCATATTTGAACAACGTAAACATCTTAGTACCGAGACCGACATTGAAAC |
| | | GCCAGCATTATTCGAGCCTCATGGTAGAATAACTGCCGCAGGGGTTGTATTTTTCTGTAGCTTTTTTGTGGAGCG |
| | | TAGAATCTTGAACCGTCTGATGGGTCGTATTCCGGGCTTCAAAAAAACGGAAGGTGAGTATGGGGCAACTCGGC |
| | | AGATGTTTTCTAAGTATTGCCTTAGAGACTCATATAGTATTCGCGCATCGGACTCAAATGCGGTCCTGTTTAGAG |
| | | ATATCCTGGGTTACCTGTCACGGGCACCGAGCCAATACTATCGCCACAATAAAGATCAGTGCGACAAAGATGGC |
| | | CATCCTGAGAGAAAGAAAGATAAGTTCATCAATCTTGCATTGAGATATCTTGAAAGCTTCGTACCTGCCCGTTTA |
| | | CGCAATCATACGCTCTCTGTCGGTCGTAAAGAAGTCGTTCGTATGGAGACAAATGCCGTCGCTGAAGGCGAAGG |
| | | CGAATACCGCCCGTATCCGCCCAAAGCAAAGGTGAAAGTTGTATTCACTGAAGATGATCCGGAGCGACCATACT |
| | | ATATTACTCATAATACAGTTATTCTGCAGACCGCAAAGAAGGAAGAGGACATTCACCATTGTAAAGTTGGCGTG |
| | | AACGAGCTGAAGTACCTTGTGTTACTCTGTTTGCAAGGAAAAGCCGAAAAGGCTGTCGCAGGCATTGAAGGTTA |
| | | TGTGCGCAGAATCCAGGGGCGCTTTGCCGATCACACCAATAAAGTAGCGCGCGATGATGATGAACGGCTGGTAC |
| | | GCGGCTTGCCAGAATTTGTCCGCGTGGCCTCAGGAATTGAAACACCCGACGAAGTCCGGGAGCTGAAAAGCCGT |
| | | CTCGATCACATACGGAAAAAATGGCAGACCAAGAAAGCTGAATCGGCTGAAGCGCAATTACATCGGAAGGCTC |
| | | GGGATGTTTTACGGCACATCAATTGGGAGTCACAGCGACCACTCGGAATCGAGCAATATAACCGGTTACTCGAG |
| | | CTGTTAGTTAACCGTGACCTTGAATCCTTCGCAGCCGAGATGAAGGAACTGAAAAGACGCGGATTGATATCCGA |
| | | GGAGCTCTTAAAAAGTGTTGAGGGAATTCGTAACCTGAATACACTGCATGTGAAGGTTTGTAATCTGGTCCTGA |
| | | CGCGCTTGGAACATCTGGTTGAAAACGATCCAGAGGAGTTAAAACGACACATTGGTATTGTACCGCGTGAAGAA |
| | | AAAGAAGGTCCCTCATACGAAGAAAAAGTTCGTGCCTTTGTACAGCAACCTATGATGTATCGTGGTTTCCTGCG |
| | | AAATTCCTTTTTTAAAGGGTCTGGCAAGAGTTTTGCCAAACTTGTGGAAGAAGAATTGCACAAAAAAGGTTGTC |
| | | CGGATGTGCCTCTGGGCACCGACTACTACCTTGTGCGCGATTTGGAACGAGATGAACGTAAAAACCGCTTTCAT |
| | | AATGATAATGCGGCGCTCTATGAAACACTCGCGTTGGATCGTCTGTGTGTGCTGATGGCGCGCGACTGTTTGGTT |
| | | CGTCTGAACCGGAACCTTGAAAAACATGCTACGCGCATATCTTGGGAAGCTACCGATGCGGGTGATACAATCTG |
| | | CCTCGAATTGCCGCGCCGTGATCGTGATCATGAAAGCTTTAGACTGTCTTTTGGGGTCCGTGATTATCCTAAACT |
| | | GTATGTAATGGATGATCCCGTATTTCTGTGTGGTTTAATGAAGCACTTTTTCCCGGACAACCAAGCAATTCAGTA |
| | | CCATGAGCTGTACTCGGAAGGAATCAATAAGTATACGGCTATGCAGGCCGAAGGTATCGCGGCTACTCTGAAGC |
| | | TGGAAGAGAAAACGATAAAAGAAAAAAATATGCAGATACCAGCCACCGGTTACATTCGCTTTTGCGAAATTGTT |
| | | AGCCAGTCGGACTTCGCACCTGGCGAAAAAAGAGTGCTGAAAAACGTGCGTAATGGCTTACTGCATTATCATCT |
| | | TGAGTTTGAACCGACAGAATGGGCGGAGTTCCGAGAGATAATGAAACGCGAGGGATTTGATACTGCGAAGAAA |
| | | CGTAAAAGTACCCGCAAAAAGTAA |
| 315 | JW13138 | ATGGAAACTCAGGAAAATGAATTGTTTGAGAATCGTAGACGGACACTCGCAGATGATCCTCAGTACTTTGGCGC |
| | | GTACCTTAATCTCGCTCGTCTGAACATCTTCAGCATTAACAATTATCTGGCGAAGGAATTCCAACAAACAGAATT |
| | | GCGTGATGACGAATTAATCCAGAACGGTTTCATCTGCATTCCCAGCCAGAAAAATCGTAACGACAACAAACTGT |
| | | TCGAACGCTTAATCCGTCTGATGCCAGTAATTAAACAATTTGATGCGGCCAGACTGCCGAATGAAGAACAAAAA |
| | | AGTGGTCAAGCCGAAGGTAAAGATATAAAGACTATGGCCAAAACGCTGAAAGCTCTGTTCAAGGATATGCAGG |
| | | AATTTCGGAATGACTACACCCATTTTTATGCAACAGATAAACAGGAATGTCGTAAACTTACGGTCAGTAGCGAA |
| | | ACCGCTACTTTTCTTAAAGCCAGCTTTGCCCGTGCCATAGAATATTCGAAAGTACGTTTTAAAGATGTGTTAGCA |
| | | GAAGATGACTATTCCCTTGTGGCTGGTAAAGAACTGGTCGAGGATGAGAACACCATAACCACCGAAGGCCTGGT |
| | | GTTTTTTACCGCGTTGTTCCTTGACCGTGAGAATGCGTTTCAATTCATTGGAAAAGTGCAGGGGCTGAAAGGCAC |
| | | ACAGTTCAAAAGCTTTATTGCAACTCGCGAGGTGCTGATGGCTTATTGTGTCCGTTTACCGCACGACAAACTTAT |
| | | CTCTGATAATCCTATCCAGGCATTACTGTTCGACATTTTGAATGAACTGAACAAGTGCCCCAAGAAGCTGTACAA |
| | | TGTTCTCAGCGAAGAAGTGAAAAAAGAGTTTCGTCCAGAGCTTTCCGAGTCAGGAATTGAGAATATGCTTGCCA |
| | | ATAGCTTTAATGATGAGGAACGAGAGAAGTTGTTGGACGAGATTGAATATAAAGAGTATATCGAGCAGCTTACG |
| | | ATACGTGTGCGGCATAGTAATCGTTTTCACTACTTTGCGATGCGCTTTATAGACGAGCAAGAATTATGGCCAGGA |
| | | ATTCGCTTTCAAATCGATCTTGGCAAGTATACGCTGACACAGTATGATAAACAGGTTTTAGGGGAAAGCATACC |
| | | ACGCTCGGTGGTAGAAAATACTCGGGCATTTGGTCGTCTGTCTAACTTTCTGACAGCCGATCCTGACTCTCTGGA |
| | | GCAGCGTATTGATGTTGATCATCGGGCCAATGGCTTTGAACAATTTGCGCCCCATTATAATGCAGATATTAATAA |
| | | GATCGGTATTGCATTCACAGAGAAGGAACAGTTGCCGTACGTCGTACCGACAAAAAATGCGGAGACCAATCGA |
| | | GTCAAGTATTCCTTTAAACAGCCACAGCCGGACGCCTTTATTTCGTTGCATGAGTTGGCGAAAGCCATTTTACTG |
| | | GAACAGTTGCAGCCTGGCGAAAGTGAAAAACTCATCCGCGCATTCTGCTCTACAGCAGAGAATAAGCTGTTTAA |
| | | TCTCGAATTCATCGAAAGTATCAAGTGGAAACTGCCGGATTGGAAACCATTCCAGAAGCAGTGTGATACCAAAA |
| | | AATCGCGTGCCTACATTACCAAAAAAAAGATGTTCGCTTATGCCCCACGCGATCGGAAAAAATTGCTGGATGAA |
| | | CTGCTGGCCCCGTATGGCCTGAACTGGAAACAGGTACCTGAACGTATACTGAACTATTGGTTAAACATTGAGGA |
| | | AGTCCATGATGCGCGATCAATCAAAGAAAGAATTTTACTCATGAAACGTGATGGGCTGAAACGACTTAAACAAC |
| | | TGGAAAAACATCGCAAAGATCCTTCTATTAGAATCCCGAAAGTTGGTGAAATGGCGACGTTTTTAGCAAGAGAC |
| | | ATTGTGGACATGATGATTGATAAAACAAAGAAACAGAAGATCACATCTATCTACTACGACAAAATGCAAGAAT |
| | | GTCTGGCGTTTTATGCTGACGCAGAGAAGAAACGCCAGTTTATAGGTCTGGTGCGCGAACTGAACCTGAACGCA |
| | | CCGGACGGACACCCCTTCCTTAAAAACCTCAACTTGGAAAGTATTCGCAAGACGTCAGAGTTTTACAAGTTGTA |
| | | CCTGATGGAGAAAGTTGAGAAAATGATAGAAAACGGCTATAAGTCCAACGGTGACAAACGTTTTAAGAACATC |
| | | GCTTGGATCATACGAGTTTTCGAGGAAAAGCAGAAAAACGAAAAAAATGGGAAAGATGACACCATCTATCGCA |
| | | TCCCAAATAATCGGAATGATATTCCGTACACCATCCGTCAGTGGGAGAAAGAGACTTCTACTCTCGAGGAATGG |
| | | CTGCATACGATCAATCATGGAAAACAAGAGGGTGACCGGAAAAGACCTATAGATCTTCCGACCGATCTTTTTGA |
| | | TGCCCGTTTATGCGAATTAATGAAAGGACAGATGCAGGAGAATGGCCAAACGTTCGCCGATACAGCTAAGTATA |
| | | ACGAACTGTTAAAACAGTGGTGGTCCTTGCGGGAAGATGAAACTCAGCCTTTTTACAATGGAGCCCGCCACTAC |
| | | GTTATTAAAGAAGAAGCTGTGTGTTTTATGCCTGGTGCCCAGCCGCGACTCACCAGTTGCTATGCGGATGCAGTA |
| | | GAGGAAGCTTATAATAGACTGAGTGCAGAACGGAATATAGCGCGCCGCCATAACAAACAATTACCTTTAATCCA |
| | | AAAGCAGAAAGTGGAAAAAGTATTCAAGCACACTTTATATGACACGGAGCGTGAAATACGACTGCTGGGCGAA |
| | | CAGGACAGAATTCTCTTATTAATGGCAGAGCAGTTAACACCGGGCCGTGAAACCCTGAAGCTGAAAACCGTGTC |
| | | AGAAGAACTGACACGCCCCCGCGAGATTAAAAAAGAATTCCCGTATATTTCTAATTACAACGCGCAAGGGGAG |
| | | AAGCTGCCAAAAGATGAACCGAAGCCGAAAATAAAAGTCACGGTTACGGGAATTATGCAACTCAAAAATTCCA |
| | | ATGATCTTAATAGATTCGCGCACGACCGGCGCATGCCAGAGTTAGTTGCATATCTTCCGAATGCAACCATTGATG |
| | | CTGATACCCTGAGATATGAGTTAATGGATTATAATAAAGCTCGGTTGACCGTTTTTGACGCTGTATTTCGTTTAG |
| | | AAAAAGCTATTATTGATCAGGATCGTGAAGGTGTTATTACTTTATTCACTGATGAACAAGGCGAAGCCAAACAA |
| | | GGGCGCATGCAGCATAAACCTTATCTTCAGTGGTTACTTAACAAGGGGATCATTACTCAGCCAGAATCATCGTA |
| | | TCTTAACATGCTGCGCAACTCATTTTCACACAACCAGGTCCCCCATATAGCAGTTGCTCTCAACGGTACGGAAGT |
| | | TGTCCCCGTTAAAAATATTGCATCAACGATTGCGGGTGCGTATAAACAAAAGATTGAAACTATTATTGGTAAAA |
| | | TAGGGTAA |
| 316 | JW13139 | ATGAAAAAAGAGTTGAACAGAGAGGATGTTTTTACTGGGGGCAAAACCCCTGAACTGACGATCTATTATAATAT |
| | | AGCTTATTTCCGTATGGCCGGTCTGATTAATGCGCTGTGCGGCAATAAACTTGAGCGAGATAAGGATGCGCTGG |
| | | AGCAGTTCATGAAAGCCTTTATAAACGGGAAACAGAAATTAACGGACATGCAGTTTGTGAAACTTTGCGACTAT |
| | | CTTTGGAAAGGCTACAAGTATGATAAAAACCGTAGCGAGTATTCGCTGACTGAAAACGATAAAACGATGGTCCT |
| | | GAAGATGGTAGCCAAACTTCAGGATATTCGTAACTTTCAATCACATATCTGGCATGATAATAAGGTCCTCGTGTT |
| | | TGATGCGGATCTGGTCCAATTCATTAAAAATAAGCATCTGGAAGCGATTGATGCACAGCGCCAGCGCTTTTCTA |
| | | AAGAGACAGAAGTGTATGAGAAAGAAAATCGGGAGCTTAAAAAGAAAAAGAACAAGGAGTTACTGTTTGACAT |
| | | CCATGATGGATTGGGTTATATCACAGGTGAAGGTCGCAACTTTTTCCTTTCATTTTTTCTTACACGCGGGGAAAT |
| | | GACGAGATTTTTAAAACAGCGAAAAGGATGCAAACGTGATGATACACCGGAATATAAGATTAAACATCTTGTTT |
| | | ATCGTCATTTTACTCATCGCGATGGAGCGACAAGAACTCACTATGGTTATGAGGATAATATGTTAGATCAGTTGC |
| | | CGGATAAACAGGAGTTTCTTACCACGCGCCATACTTATCGTCTGATCAATTATCTTAATGACATCCCGGAAGAGG |
| | | TTACGAATCCAGAGTTGTTTCCGCTGTTCAATACCATTAGTAACGGGATTCTCATAAAGGAAAGCGTCGGCACTT |
| | | ATATCGCCTTTATCAATAAAATGCCTTTGTTATCGGACTTTGAGTTTAGTGAAGTCTGGGGCAAAGATGGTAAGC |
| | | CGTATACTAACCTGGTAGAATTTTACCATAAAACACAACCTGGGTTTAAGTTTCGCACAGATCTTAACAGTTTCC |
| | | ACAAAATCATTTTAAACTTAATTCGGGACGAGAACTACACGGGATTCTTTACGACCCAGCTTAACCTGTTCATGG |
| | | CACATCGCGAGGAGCTGATTTTAGTTATTTCGAAACCACTGATCACACCTAATGATCTGTTGCTGATTGAAGAAC |
| | | ACTATCGGTATAAACTCAAAGCCAACGATTTCGTCCGGGAAAAACTCGGTGAATGGAAAGAAAAGATTGAAAA |
| | | AGGTAAGTGGGAAAAAGCTAATGAACAAAAAGACAAACTGATCAATCTTTTGGGTGGCGTAATCGAGATAACC |
| | | TTTTACGATTTTTATTGGCAAAAGGACGAAAAACCCCGCAACGAAAATCGCTTTATGGAATTTGCTATTCGGTTT |
| | | ATGGCTGACTTTAATCTGTTACCGGACTGTGAATGGGAAGTTGAACCATTACAGATAGAAAATGATCTGATTGC |
| | | AAATCGGACCGCAACCCCGGATTTGAAAAAATCGGGTTCTCAATTCATGAATCAACTGACTGATAACTATCGTT |
| | | TGAAATTCAATGATGGTCAAATAGCTTTTCGTTACCAGAATCAAGTGTTCATAATGGGGCACAAAGCGGTTAAA |
| | | AACTTGCTGATAGCCTGTTTTGACGGGAAAGAAAAAATGTTAAACGGCTTTATGCCAGCGCTGCTCGCAGACCT |
| | | CAAGAAAATTACCAATGAACATATTCTGAAAAACCATCAGGCGCTGAACACGCTCTCACTGCTGAACAATGATA |
| | | GTATACCCAGCTATATTTCTCGCCAGTGGGGTGAGGCAGAGCCCATCACGGATATGAAAAAAAAGGCCATCGCG |
| | | CGAATGGACTATATTACACAGCAGTTTGAAGCATTGATCGAGAATCACCATTACCTGAATCGAGCGGATAAGAA |
| | | CCGACAGATCATGCGTTGTTACAAGTTTTTCGAATGGCAGTATCCCCAGAATTCCCAATTCAAATTCTTACGGCG |
| | | GAATGAATATCATCGTATGTCTATCTATCATTATTGCTTAGACAAAGAGCAACACAAGTATGACAAAAAAGGGC |
| | | ATAACTACCTTTATAATCGGCTCATTAAAGAAAGCCACAATGAGTCAGGCAATATTGAGCAACACCTTCCATAT |
| | | CAAATTCGTACCATGCTGAACGATGCAAAAGATTTCAACGACTACTTCCTGAGAATCCTTAATGCAACCCATAA |
| | | GATTCTCACCGACTGGAAAAATCAGTTAAAACAGGGACGAGAACCAAATAATTATTATCTGAGTAGACTCGGTT |
| | | TCACAGGTGGCTTAACTCAGAAAGTTGTACACACCCGCCTGTTGCCATTTTCCATTCATCCTGGTATTCCGGTGT |
| | | CATTTTTTTACAGAACAGAAATGAACCAGAATCCTTCTTTTAATCTGAGCGCAAAAGTGTGGAATAGCGAATCC |
| | | CCATTTCGTGTTGGACTGAAAGAATCCAACTACCAATACGCTAAGTACCTCGGACTGTTCAATGAGATCAAAAC |
| | | CCAACGTAAAATCATTGGCAAGATGAATCAGTTAATAGCCGAAGATGCCTTACTGTGGCAGATAGCGAAAAAGT |
| | | ACCTTGATAAGTGTCATCCCAAGTTTTCTGAAATAATCAATCAGCAGGTAAACGGCAAACAGCCCTTAAACGTC |
| | | AAGGCCATACACGACACGGAATTAACAATTGATTTTCCGGTTGACAAAAACTTGTATCAGGTGGTTGTGAAAAT |
| | | GAAACAATTGGACGACTTCATGTTTATAGATTCAAAGCCGGTGCTGGAGAAAACCATCCGCTACATGATTAAAA |
| | | ATAGTTTACGTGACAAGGAATATCAACAGCGTGTGTTCATAGAAACAAATCCTGGCGTTTTCAAGATTCCGTAT |
| | | AATGAAGTGGTAGAAGCTATGCGCACTATTAATCATCAAGCACTGACTTGGGCTAGATTACTGTTAGATTGGGA |
| | | ATCCAAAACAGTTAAAACAATTCCGGAAGCAGACAAAAAAGCAAAACTGCAGGAAGCGTACAACAAGCGGCA |
| | | GCCGGCCTTCTTTAATTTTAACGATATATGTAGATACGCCGATGATGGAAAACAGTTGAAAGATCTGCGCAATA |
| | | AAACTTTTCACACCGAAGTACCTGAGACCTGGACGTACGATGAGATGCGTGAGAACAAAACGATCAAAATGGT |
| | | CCTGGGCATTAACGAAACCACCTTCTTGAAGAAAGATTACGCTATTGAAAATGCTCGTACTATTGAATAA |
| 317 | JW13140 | ATGCGTAAAAATTATCAGACGAAACCAAAAGCCCCAATTTCAACTGATCAGCTGTTCACCGGTGCAAAAACTCC |
| | | GGAGTACGCAGTGTTTTACAATATCGCCTATTGGTGGATGTCTGAAATGTTAAAACGATTATACAAAAACACAG |
| | | ATACCAGCATCCACGAAGATACTTCACCCTTTATCCAGCGATTTGTTAATGATGGGGAAGAAATTAATTCCAGTA |
| | | TTTTTAGTGATGCAGACTACATTAAGCTGCGTGACTATCTGTGGAAAGGCTATCTGTTTGATAAAAATAAGTCCG |
| | | GCTCTATAATAACCTTCAAAGACAAGGTAATTATTCATAAGATTATTGCGAAACTGGCAGAAATTCGGAATTTC |
| | | CACTCCCACTATTGGCATGATAACAGCATACTGAAATGTGATGAGGACTTGAAATCTTGGATTGATTTTCTTCAT |
| | | AATTACGCCGTCGATAAACTTCGCGTTGAATATTCTAAAGAAATCGAAAGATACGAATCGAATCGAGATAATTT |
| | | GTTTGACATGCATGGTTCGGATTATTTTATTACTCAAGAGGGCAGAAATTTTTTCCTTTCATTCTTTCTGAAAAAA |
| | | AGCGAGATGAGTCGCTTTATGCAGCAGCGTAAAGGTTGTAAACGCAATGATAAACCGGAGTTCATGATCAAGCA |
| | | TCAAGTATATCGTTATTATACGCACAGAGATGGAGCCAGTCGCAATCGTTATTCAATAGAAGAAACTGTTTTTTC |
| | | TGCCCTTGACCCAGATTCTAAAAGTGAAATTAACAAAGCCCGTCAAGTTTACAAAATGTTAGCATATCTTAATG |
| | | ATATACCTTCCGAAGTCATTGACAAGAAGCTGTTTCCGCTGTTGCTGAATGACGAAATTGTTGAAGATTCGACAC |
| | | AGATTATTAAGTTCATTAAGAAACACAACCTTTTCTCGAATTGCAAATTTGGTATTATCGAAGATTCTAAAGGGG |
| | | AAGTCATCCAAAAAGAGGTTCTGTTTAGTTATGTGGATAGCAAGTATAATTTCCGAATACGTATTGCTGCTCTGC |
| | | ATAAGCTTATCCTGGATATTATTCGTAACAGTAAACGCGAAGAAGAATTCTATAATACCCTGAAAACTTTCGGG |
| | | GATTTTCGTGATCAGTTTCCAATTATCTTAGACGATATCAAAAAAGGTATCGGCAATATTGAGGAACTGAACGA |
| | | ATACTATATTTTTAAACTCAAAGCGGATGACAAAACCAGAGGACTGTTAGGTAAAGTGATTGACGACTACAATA |
| | | AGAATCAGTTTATCAAACTGAAAGACTATAACGAACTGAAAGAGAAAAGCGTGGACGAGCCAATCCAATTGAT |
| | | CTATCATAATTTTTATTTTGAATCAGGTCAGAAACCTCGCTCTGGCAATCAATTCATGGAATTTGCTGTTAAGTAT |
| | | CTGATGGATAAAAATCTTGTTCCGAATTGGGAATGGCTCTTAGAAAAGTATGAGTCTGAGGAAGTTGAAAAAAA |
| | | ACTCGAGAACAACAATCCGAAGAAAGTAGTGAAACACATAAAAGCCTATTTTTCATATATCCCGGATGGTTATC |
| | | GCCTGCACTTCAAGGAAGATCACGTTCTTCTGCGTTTAAAATACGAGTCAGAAATTATCATTGAGGTGGGGGAA |
| | | AACGCGATGAAGAATCTTTTAATTACTCACTTTCATGGCAAACCTATCAATGAAGTCGTCGAAAAGACCGTAAG |
| | | CGATATAAACAAGATAAAACACGTGGCGAAAAACAACAAAACATTAACAGAGAAACTTGAGCTGTTAAACGAC |
| | | AAGACTATACCTCGTTATTTGAAACTGATGATGCATGACGAAAGTGTAATGCAGAATGAGACAATTAACTATAG |
| | | CATTATACAGGCGAAAAATCGCATCGATCGCCTGATTGAATACTTTGAAGATCTTCATTCAGATAAGGTCAAGC |
| | | TTAATCGGAGAGAGATTAATATCCAGCTCATCCGTTGTTACAAATATTTCGATTGGAATTATCCGAACAACTCTG |
| | | AGTATAAGTTTCTCCGGCAAAATGAATACCAATTAATGTCAATCTACCATTACACGTTGGCCAAACCGAAAAAC |
| | | GCTAAACACCATCTGTTGATACTGCGGAAGGAACTGTTTGGTGACATCAATAAACATCTGCCGACCAACTTGAA |
| | | ACTGATCCTGGAAGAGGCCACATCCATCGATGAACTGTTCAAAACGGTGTTACTGGAAACGATAAGCCGCCTGA |
| | | ACAAATGGAAAAATAGATTCAGTTCTATGAATTCGAACCAGAAAAAAGATTGCCTCAGTAAACTTGGTATACAT |
| | | ATCCCGAAAATCCCGGTCCCTGACGCGTCAAATAAAGCAAATCTTGGCCAGATGAAAAACTTGCCCTTTATGTT |
| | | ACACCCGAGCTTAGTTTTTATGACTTTTAAGTATTCCCGTTCTAGCACCATATTCTCAGAATACCGGGACAATCC |
| | | CAAAAACAGCAAGGGATTGTTAATGGATCATTATAACTTTCAGAGCTATCTCGATTTGCATTCCGTTTTAATAGA |
| | | TCAGAAACAGGCTCATAAAATTGTGGGGACGATTAATAACCTCAAAACTTTAGACACGTTAATATGGCAGATGA |
| | | CAAAAAAGTACCTGGACGATACCACGAGCGATATATTGAAAAACATTACCAATGAGCTGATTAACAGCTCCACA |
| | | GAGAACTTCAATGTTAATCAGTTGCATAACTTTGAATTTCCCATTTTTAAAAGTGACAAAAGTGAGGTGAAACCT |
| | | TTCAAAGTGATAGTCAAGTTCAAACAGTTAGCGGATTTCATGCTCATTACCGAAAAACCTTTAAAAAATGTAGC |
| | | TCTGCAATTATTCAAGCGTTATCAAACCAACGAGGAGTTGGAGAAGCTCGAGGTGTACTTTAAGAATGGATTTT |
| | | ATGAGATACCCTATGTACAGATTAAGCAGGAAATGGACCGCATCTATCGGGAATCCCTGATTTTAGCAGATTTT |
| | | ATTTTGGATTGGGAGAAGTCGATCGTGGATAAAATCCCAGAGATCGAAAAGCAAAAGCTTATCGAATCGGCGA |
| | | AACAAAACACAAATGGCTATAAGGCGTATATCAATTTTGATACGGTTTGCAATTATGCTGGACTCATTAAAGAA |
| | | GAACAGTCAGAACTGCAGAATCTGCGGAACCATGCACTGCATGCTAAAATTCCAGATAAAGATTGGACATATAA |
| | | ACAGAAACTGAACGACAACCGCATTCAAAAAATGCTGTACATTACCTTAGAAAAACTCGAAAAATACGAAAAA |
| | | AAGAATGCATACTACGAGTCCAAGGTACTTCATAACACATATTAA |
| 318 | JW13141 | ATGGAAAAAAGTAAGCTTGATAATGAGATGACGTTTGCCGAGGATGCCTATTACTTTGCGCATTATGCAAATAT |
| | | GGCTCGCCATAATGCGTATCTTATTCTGAATCACATCAATAAAAGTATATTTGGCAACGAGTCTACCTTAAAAGA |
| | | GGAGAACCTTCAGATTGCTATTATTAAAATACTTGATCCTAAAAATGGAGCCGACCACCATGCTAAAGCGATTA |
| | | AACTGTTGAATCATCACTTCCCGTTTATCGCCTGCTATTATAAAGAAGATATTAAAAAAGCCGTGGAGAATAGC |
| | | GCATACAAAGAGATGAATGACAAAAAACTTGATCACCTTAAGGAACCTCTGACGCTGAAACAGATACTGAAGA |
| | | CCCTGACTGGCATCCGTAATGAACTCAACCATTATGGGTATTCCCGTAAAGAACACCCAATCCCGTTCTTTCAGG |
| | | ATCTGTTTAATGACTCAATTCAATTGGCGAAAAAACGCATGATAGAGTTCAATGAAACCCGTTTTAATAGCATTC |
| | | AGGATTCACCGTATCATAAAATGGTTGATCCCAAAGATTCCGTCCTCACGGACACCGGCAAACTGTTTTTCTTGT |
| | | GTCTCTTTCTTGACAAAAAGAATGCGTTCGAAATGTTGGCGAAAGTAAAGGGTTTTAAAAATCGGACCGACGAA |
| | | AAATACCGTGCAACCCTGGAATGTTATACGCAATTATGTTGCAAAACTCCCTATCCGAAACTGGAAAGCAGCGA |
| | | TATCAGTTTGGATATATTAAACGAGTTGAACCGTTGTCCCAATGCCTTATATCAGGTGCTGTCTGAAGAAGATAA |
| | | GCTGAAATTCAAAAAAGAACCAAATGAAGAAACTGCGGAAGAGTTAAACCCTATTATGAAACGTTATGATGAT |
| | | CGTAGTGCTTATCTGGCACTTCGGTATTTTGACCGTACCAAGTGTTTAGACAATATAACATTTCATCTTCAACTCG |
| | | GGCGTAAAGTGATGGGTGAACCGCACAAAAAAGTGTTTGACGGAAAGGAACGCACCCACCAAATTTTAAAAGA |
| | | AATGCGAGTACATGATAAACTTAGCACGTATGAGACTGAAGAGGCCCAGACATTTTTTCAGTCAAAGATTGAGT |
| | | CCAACGAAGTTGAATTATTTGCGCCCCATTATCGGATGGTTGGTAATCGAATTGGCTTAAGTTTTGGTACTCCGT |
| | | CCGAAAAAAAAGAAGGTTATTCGATCCCTATTAATAATCAGCCAGCCCCGCAAGCTATTTTGTCTACCAGTGAA |
| | | TTGGGTGCATTATACATCTACAATCGACTGTACAAGGAAAATAAAATCACTCAATCACCGAAAAACCTGATGTC |
| | | CACTTATCTTCAGACCATGAACCGTTTTATTAAAGATTGGAAAAACGATGGTATCAAACCGGAGACCAGTTCGA |
| | | ACAAAATCATTAAGGAACGTAATCAAGAACGTACGAAACAGACGATCAATGAATTAAAACGACGTACGGATCA |
| | | TCTGCAGAAGCTGCTGGACGAGAAATATGCAGGGCTCAAAGTTAAGCACCTTCCGGATATTTGTAGAGAACATC |
| | | TGTTAAACTATCAATCAGACGATAACATACAGCAGGCAATTGACTTTCTTAAGAAAACCCTGTCAGACACCAAT |
| | | TTCAAAAAAAAGCAGCTGGAACAATTTGAGCGGAATATGGTCTACCGGAGCAGCAATTCAAAACAGTTAAAAA |
| | | TAGGCGAAATTGCACAGGAATTGGCACGCGATATAGTCTTCTTTTTGAAACCTATTAAAAAGGAGATAACCAAC |
| | | CGGAATAAAGAAAAAGTGACCGTGTTCCAAAAAATCAATAATCAGGACTTCGATATCCTGCAGAATCGGCTGGC |
| | | TTACTTTTCCCTGTATAAAGAAGAATTGTGCTCGTTCTTTGACGATCTGCTGAAGAAGAAGCACATGAAACATCC |
| | | ATTCCTGGAGAACGTCAAGGCAGAAACTAAGTGGAGTAACGGCCTGATTGAATTCTATCTGAAATACCTTGAAC |
| | | ATAAGCTCAAATGGCTCAACACATACACAAAAAATGCTCCCAATAATACAACACGCCCAAATTATACAACGAGC |
| | | AATCGTATTAACAAGAATCGCTCTACTCCAAATAAAAAGGATGAGATAGAGGAGAAGGAAATCGACCCTGAGA |
| | | AAATCAAGGAGACATTCATAGAGAAGTACAACTACTTTCTGAAAGTGAAAACCTCGTCCCCCAAAAATTATCAG |
| | | GGGAAGGCTATTTTTATTCCTGTCGGGTTATTCAATGACGCGATTACAAAAGCGATGAAAGAAAGTGGCTATCA |
| | | GGTTGAAGATGATGAAAAAACACCAAATGCTGCTTATTGGATAAAAAGTTATTTTCATGGTGCAACACAGCCTT |
| | | TTTATCAGTTACCGAGATATTATAATCGTGCCAAAAAAGATGAAGAGCGCGATCTGGTTGAGGCGGCGCTGCTG |
| | | AAAAAAGAGATAAAAAACTACTACGTTAAAGCTAACAAAAAGACGCAGAATGACTTTAAGCAGTTAGCCAAAC |
| | | GGATTAGAAAACAAGAGGAAGAAATCCTGACACAACAAACGTCGGACCGAGTTTTATTCATGATGGCAACAGA |
| | | TTTGTTGAACGGTGGTTCTGATGGACGCCAGACCATAGAATGCGAACAAATTAACACGTTAGGGTTCAACCTTG |
| | | GCGAAAACAAAATATTAGATGAGAACAGAAAAGTATCTATGAACATCTACGGACGCAAAGTTGTATCAGAACT |
| | | TCCAATTAAACGTTATGGCGAATTTCGCCGCTTTATGAAGGATCGCCGCCTGGAAAATCTGATCAATTATTTCCC |
| | | GGAAGGAAAAGATATTGAGTTAGGCGTATTAAAATCTGGTGAAGTTGAAGCCGTTGGAGAAAGATTTTCTAGCT |
| | | CTACTCTGGCCAACGAACTGGAATTTTTTGATTCTCAGCGCTGGTTACTGATGAAATCAATCTACGAGTTTGAAA |
| | | AAAAGATCTACACTCACTTCTTCGATGTACTCACCAAGAATGTGCCGGAAAAGGAGATGATGGAGAACAACTAT |
| | | ATTGCCCATTATCATTACATTGAATGCGCAAAAAAGTTAGAGTTATCCGTCTCGGAACTCGAGAAGGACGATTTT |
| | | AAAGAATTGAGAAACAAAATCCAGCATAACGAAATTCCTTACTCACAGTGGATCAAGAATAGAATTAGCACTA |
| | | AAGATGGTCATCTTATCACAAAACAGATTGTGGAGCTGGTGCTGAGCATCTATCAGCAAATGAACAACGAACTC |
| | | GATCAACTCATTCGCAAGTAA |
| 319 | JW13142 | ATGAAAACAAATCCGTTAATTGCATCTTCAGGGGAAAAACCGAATTACAAGAAATTCAATACCGAATCTGACAA |
| | | ATCCTTCAAGAAAATATTTCAAAACAAGGGTTCAATTGCGCCAATAGCAGAAAAAGCGTGCAAAAATTTTGAAA |
| | | TAAAAAGTAAAAGTCCTGTGAACCGTGATGGTCGTCTGCATTATTTTTCGGTGGGACATGCGTTTAAAAACATTG |
| | | ATAGCAAGAACGTGTTCCGTTACGAACTGGATGAGTCCCAAATGGACATGAAACCCACACAATTTCTGGCACTC |
| | | CAGAAAGAGTTTTTTGACTTCCAGGGAGCATTGAACGGCCTGTTAAAACATATCCGAAACGTTAATAGTCACTA |
| | | TGTTCATACGTTTGAGAAACTGGAGATCCAGTCCATCAATCAGAAGTTGATCACGTTCTTAATAGAGGCGTTCGA |
| | | ACTGGCCGTAATCCACTCATATCTGAACGAAGAAGAATTATCCTACGAGGCTTATAAAGATGACCCACAGTCCG |
| | | GGCAAAAACTTGTCCAGTTTTTGTGTGATAAGTTCTATCCTAATAAAGAACACGAGGTGGAAGAACGTAAAACC |
| | | ATTTTGGCGAAAAATAAAAGACAGGCCTTAGAACATCTGCTGTTTATTGAGGTAACCAGCGACATTGATTGGAA |
| | | ATTATTCGAAAAGCATAAGGTGTTTACCATCAGCAACGGAAAGTATCTCTCATTCCACGCGTGCCTCTTTCTGCT |
| | | GAGTCTGTTTCTGTACAAATCCGAGGCTAACCAGCTTATCTCTAAGATTAAAGGTTTTAAACGTAACGATGACAA |
| | | CCAGTATCGGAGCAAAAGACAGATCTTCACGTTTTTTTCTAAAAAATTCACCAGTCAAGATGTTAATAGCGAGG |
| | | AACAGCACCTTGTAAAGTTTCGCGATGTAATTCAGTACCTGAACCATTATCCGAGCGCCTGGAATAAACACCTT |
| | | GAATTAAAATCAGGTTATCCGCAAATGACTGACAAACTTATGCGCTATATAGTTGAAGCAGAAATCTATAGATC |
| | | TTTTCCAGATCAAACTGATAACCACCGCTTTCTTTTGTTTGCCATCAGAGAATTTTTCGGCCAGAGCTGTCTGGAT |
| | | ACATGGACGGGAAATACACCGATCAATTTTTCCAACCAGGAACAGAAAGGGTTCTCGTATGAGATCAATACTTC |
| | | GGCTGAGATAAAAGACATCGAAACTAAACTTAAGGCTTTAGTCTTGAAAGGGCCGTTAAACTTTAAAGAAAAG |
| | | AAAGAGCAAAATAGATTAGAAAAGGATCTTCGTCGAGAGAAAAAAGAACAGCCCACCAACCGCGTAAAAGAA |
| | | AAATTACTCACGCGCATTCAGCACAATATGCTGTACGTTTCGTATGGTCGTAATCAAGATCGTTTTATGGACTTT |
| | | GCTGCACGGTTTTTAGCAGAGACCGATTATTTCGGCAAAGATGCCAAGTTTAAAATGTATCAATTTTACACTAGT |
| | | GACGAGCAGCGCGACCACTTGAAGGAACAGAAAAAAGAATTACCCAAAAAAGAGTTCGAGAAACTCAAATACC |
| | | ACCAGTCCAAGCTTGTTGACTATTTTACCTATGCAGAACAGCAAGCACGATATCCGGATTGGGACACCCCGTTTG |
| | | TTGTTGAAAACAACGCAATTCAGATTAAAGTGACGTTGTTCAATGGCGCAAAAAAAATCGTCTCAGTGCAACGG |
| | | AATCTGATGTTATACCTGTTAGAGGATGCCCTGTATAGTGAAAAACGAGAAAACGCAGGCAAGGGTTTAATTAG |
| | | CGGCTATTTTGTTCATCACCAAAAAGAGTTAAAAGATCAACTGGATATTCTCGAGAAAGAAACTGAGATATCTC |
| | | GCGAGCAGAAACGGGAATTCAAAAAACTGCTGCCAAAACGTTTACTCCATCGCTATTCACCGGCCCAGATAAAC |
| | | GATACCACGGAATGGAACCCAATGGAAGTAATACTGGAAGAAGCGAAAGCGCAGGAACAGCGGTATCAGCTTC |
| | | TTCTGGAAAAGGCGATTTTGCATCAGACCGAGGAAGATTTCCTTAAACGCAATAAAGGTAAACAGTTCAAACTG |
| | | AGATTTGTACGCAAAGCCTGGCATCTGATGTATCTGAAAGAATTATACATGAATAAAGTCGCTGAACATGGTCA |
| | | TCATAAAAGTTTCCACATTACAAAAGAAGAGTTCAATGACTTTTGCCGTTGGATGTTTGCGTTTGATGAAGTCCC |
| | | GAAGTACAAGGAATACCTGTGTGATTACTTTAGCCAGAAGGGATTTTTCAATAATGCCGAGTTCAAAGATCTGA |
| | | TCGAGTCAAGCACGAGTCTTAATGACCTGTATGAAAAAACAAAACAGCGCTTTGAAGGATGGTCAAAAGACCT |
| | | GACCAAACAGTCAGATGAAAATAAGTATCTGTTGGCCAATTACGAGTCGATGCTGAAAGATGACATGTTGTACG |
| | | TGAATATCTCTCATTTTATTAGCTACCTTGAATCAAAGGGGAAGATCAACCGTAATGCTCATGGCCACATTGCAT |
| | | ATAAGGCTCTCAACAATGTTCCTCATCTTATTGAAGAATATTACTATAAAGATCGATTGGCACCCGAGGAATAC |
| | | AAGTCACATGGTAAACTGTACAATAAACTTAAAACAGTTAAGCTCGAAGACGCGCTGTTATATGAGATGGCTAT |
| | | GCATTATCTGTCTCTGGAGCCTGCCTTAGTGCCGAAGGTTAAAACTAAAGTTAAGGACATCTTGAGCTCTAATAT |
| | | TGCATTTGACATTAAGGATGCCGCGGGCCATCACCTGTATCATTTGCTGATTCCCTTTCATAAGATTGATAGCTT |
| | | CGTGGCGTTAATCAACCATCAAAGCCAGCAGGAAAAAGATCCAGACAAAACCAGCTTTCTGGCGAAAATACAG |
| | | CCGTATCTTGAAAAGGTCAAAAATTCGAAGGATTTGAAAGCCGTATATCACTATTATAAAGACACACCTCATAC |
| | | ATTGCGTTATGAGGATCTTAACATGATACATTCCCACATTGTGAGTCAATCTGTCCAGTTCACGAAAGTGGCGCT |
| | | GAAATTGGAAGAGTACTTTATCGCCAAGAAGTCCATTACATTACAAATTGCCCGGCAAATATCGTACAGTGAGA |
| | | TAGCTGATCTGTCGAATTATTTTACGGATGAAGTCCGTAATACCGCTTTTCATTTTGATGTTCCAGAAACTGCAT |
| | | ATTCTATGATTTTACAGGGTATTGAGTCTGAGTTTCTGGATCGTGAAATTAAACCTCAAAAGCCTAAAAGTCTGT |
| | | CTGAACTCTCAACTCAACAGGTGAGTGTCTGTACTGCTTTCCTCGAAACACTCCATAATAATCTGTTCGATCGTA |
| | | AAGATGATAAAAAGGAACGGCTGTCCAAAGCTCGCGAACGTTATTTTGAACAAATTAATTAA |
| 320 | JW13143 | ATGCCTACTACGAACAACCAAAAAAAGAAAGCTGATTCAATCAAACGAACGTCTCCATCCCCCTCACGTATCAA |
| | | TGGGGTCGCAAAACCCCGCCCGCTTGTCGTTGATGAGAACAATAAACATGTTCTCGGGGGTTATTTCGGGCTGG |
| | | GCCTCAACAACTTTTACAAAGCGACCCTGAGCATATTTGCGCGTACAGGGATTAAAATTGCCTCAAAAAATGGC |
| | | ACGGTGCTTTATCCGGAAGAGAAAATAGGACAAGTGATACGGGTCCTGCGGCGTTCAATCTCGGACACTAGCGG |
| | | TAATCTTACACATGAAGAGAAAGTATGGTCGAATGCTTTTAAACTTAGTTCTTCCCAGGAGATGCGCCTGCAAA |
| | | AATTGATTTTCCATCATTTTCCGATCTTAGGTCCCATTATGGCAGACGAAGGTGCCTACAAAGCAAGCACTAACA |
| | | AAAAATCAAAAGTGACGGATGCTTACTCTATGACCTACGGCGTTACCCTGGAAGAATGTTTGGACGTTCTTGGC |
| | | GATCTTGCGCAGACCTTGGTCGATTGTCGGAATAGCTATACTCATTTTTATCCATATAACAGTAAAGAATCGACA |
| | | GCAGACCAGCTTGCGCTGCAGAGTAAAACAGCCCGTTATCTTGATAAAGTGTTTACCGCATCCCGTCGGCTCGA |
| | | TAAGGATCGTAACAATATAGATACTGCCATGATGGAGTTCATAACAGGGTCTGCTCGAAATCTGCGACAGTATG |
| | | TCGAACGTTATGGTTTTTACCCAAAGTATGACGAGACAGTGACCTATGAGAAGGATACGCGGGGACGTGAACGC |
| | | ATGAAAAAGAAGATGACTGAGAGAGATGATTTCTTTTACAAGATAGGTAACGAAAAAGAATGTGACGGGAAAC |
| | | GGTATACAGTCCTGTCTGGTTTCGGGTTATCCTTTTTTTGCGCGGTATTTCTGTCTAAAACACAGACACGTAATAT |
| | | GCTGGCCGACATACGATTATTTGAAACTTCACCGTATCCTAAAGAACTGGATGACATTATTCGCGATATGATGTC |
| | | GATCTACCGCATTCGGGCCCCTCGAGGCAAGAAAAAGCTGGAAGCTGGAAATACTGGTGTAACCCTGGCGTTGG |
| | | ACATTCTTAACGAACTGCGTCGATGTCCTAGAGAACTGTATGATGTTCTGACCACTGAAGGTCGTAAGTTTTTTG |
| | | AAGATGAAACGGACCGTACTAAAGATGCTTTCGTCCCAGATGATGCCTTATCACCGTACACGAGTGCTGACAAC |
| | | GCTAGTGAAACCGTGAAACGCATTCGATGGACTGATCGTTTCCCCCAATTGGTTATGAAGTATGTTGACGAGAC |
| | | CGAGTTCTTTAAGAACATCCGTTTTCAAGTGCGACTGGGTAAGTATCGGTTTAAGTTTTATGATAAACTTTGTAT |
| | | CAATGGAGAAGAGGATCTTCGTGGTTTACAGAAAGAAATCAATGGTTTTGGACGTATTCAGGAGATGGAATCTG |
| | | CTAGAAAGGAAAAATATGGGGACATGATGCAGCCGGTGGAATCAGAGAGAATTCGTATTGATGACGATCTCGA |
| | | ACTCGATCTTTTACAGTTTGCGGAAGATAGCCGTGATTCGAGTCCGTACATCACAGACTCTCGGACGGCCTACAA |
| | | TATTAACAATAATCGAATCGGATTGTATTGGAATGAACTGACAGTGAACGGTCGCACAATCCCGAAACCAGGCG |
| | | ACCATCTTCCTGACCTGGGATTAACTCCTGAGGGCAAGGCGGATGTCGATATGCCTGCACCGATGGCAATGTTG |
| | | TCGTTACACGAATTACCCGCGATGGTCTTTTATCAGTATCTGCTGTCCCAAAATGCTGACCCGAATGAACTGAAA |
| | | ACCCGCAGCGCCGAGAATCTTATTATTGGCAAGTTCAATAGCCTGCGCCGTTTATTCACAGACATTAGCGAAGG |
| | | TCGCTTAGCACCTCTGCCGGAAGATGGCTTAGTTCGTGTATTAGACGACCGCTATGGATTAACCCTTCGTGAGAT |
| | | CCCCGATAAACTTACGGATTTCCTGACTGGAAAAAAAGGTGCCGATCAGTCAAAACGCCGCCGTGTTGTGGCAG |
| | | AGCGCACCTTACTCGAAAGCCTGCGTAAAGCTATTCGGCGGCGCGACAGATACGAAGAGGACCGTAAGAAGAT |
| | | TGGAGAGAAAGATAACAAGTATGCAAAAAAAGCCTACTCTGATGTAAGACACGGTTCCTTGGGCCGTTACCTGA |
| | | GCGAAAGTTTAATTGAGTGGCAGCCGACATTAGAAGGGGGCAAAGATAAACTGACAGGAATGAACTTTAACAA |
| | | ACTTCAGGCCGAGCTCGCGACCTTTAATTCACCTGAGAAATATACACGTCTCAGAGAGACCCTGTCGGCGGCAG |
| | | GCATGTTATCTGGTCCTATAGCGCACCCATTTTTGCGCAACGTCACCAATCGTAAGATACGGAATATAGAAGAA |
| | | CTGTATCTTATCTATCTTGACCAAGAGATTGGCTACCTGAAAACCCTGCTCAACCTGGGTTACAAAGGCGGTCGC |
| | | CGCGACGATCGGAATATCGATTTTGAAGCGAGCACCTTGAAAACGCATGTAGATGTTCGGAAGCTGCCACTCGT |
| | | TAAGGGTGAGAAACGTTGGGAAAAAAGAACTCCCGACTATTGTCGCGAACTGGCAAAACGATATCTGGAAGTA |
| | | GATGGTAGAAGAACTTCCATTTGGTTGCCAGAAGGCATTTTCAGTAAAGCAATAACCGATCTGCTTACTCGTCAT |
| | | TATTCAGGTAATGATGGCCTGATGGATAGAATGCGCGATGATTCTTTAAACAACAACGTTGCGTATCTGATTAAT |
| | | GCCTTCTTCGAAACTGTTCTGGATGATCATTCCCAGCCGTTTTACATGAGTTATGATATTGATAAAAATTCTGGA |
| | | AAAGAAACCCCGAATAGATTTGCCAGAGTTTATGACCTTTTCGACATCCTGAACAATCGGAAGATTAGAAATGC |
| | | CTTAGTAAAAGTGCCCATGACCTGCAACCAAATTGCGGAGCGCTTTACGGCTAAAAATCGCGACGGGCGTAAAC |
| | | GCATTCTGGCGGAGATTGACGATCGTACTGCCGGGATGACCCCACGTGATATCGGCTCTCATGCTAGTTTGAAG |
| | | GAAGCGAAAGAAGCTATGCGTAGACGCTTAACGCACATGATCGGCGATGTGAAAGATAATGAACGCTGCGTGC |
| | | GTCGCTATAAGACGCAGGACATGATTCTCTTCCTCATGGCCAGTCAGCTGCTGGGGGATGCAATCCGCATGGAA |
| | | AAAATCGATAGCTTAGATAAGTTTCGACTCAGCGCCGTGTGCAATGCCGGTTTTTTGAACCAGACCATGGATTTC |
| | | GAATTTCCAGTTCAAATGGATGGAAACGTTATCTACATTCGGCAGGACAATATGTCTTTGAAAAATTATGGGGA |
| | | GTTTTACCAACTGCTCTCGGATGACCGCTTACCATCGTTATTGGAAAAACTGGCAGATGGTGGCAGCGATAGAA |
| | | TTGATTATGGCAATCTGATGGGCGAATTGACCAGTTATGACCTTCATCGGTCCCGTATCTTCAAAGCAGTGCACA |
| | | TGCTCGAACGTCGTGTAACGTCAGATCGACAATTCCGTATATTTCTGAATAATCCTTGCGACCGGAGATTTTACA |
| | | TTAACGATGATGCTAGCCGCATGGCAAAACGCAATAACTTTCGTTCCTTACTGATGCTGTTAGAACAGTCAGATA |
| | | CAGCAAGTTTGACGGAGTCCGAGCGTAATTTGATAATCTCTATACGTAATGCTTTCAGTCATAATCACTATAGCA |
| | | TCGACCTGCCGCGTATTGCGCCGGAGAAACGGCTGCGCAAAACGACGCTGCTTAACAAAGATACACGGCCGTTA |
| | | GGAGAAAAAAAAGCATCATTAACAACCATTGCTACATTGATAGCGGCACGCTTAGAAGAGTTACAGAAAAAAC |
| | | TGGAATCAAAGCACTAA |
| 321 | JW13144 | ATGAAAACAAATCAGCCTAAAACCATCTATTATAACTGGAAAGACAAAGCTGATTTTGCTTATTTTGCATTTTAC |
| | | ACGTCACAGGCTCTTAACAACACTAGTATTATTCTGAAGAACATTTCGGAGATTATAGAGAACAAGGTTGATAA |
| | | GACTAACGATGACAATCAGCTTTTCTCCAATGCACAAGTAATTAAAATTTTGGAAAGCAATAATTCTGTCGCAC |
| | | AAAAATCAGTCATTAATCTCCTGGACTCTAATCTTCCGTTTAGCGTTAAAAGTATTAGCGATCCTTTTCTGGTCA |
| | | AAAATCGCCTGTCGTACTTCTTATGGTTACTGAAAAACTTTAGAAATGAATATGCACATTATCACGAACGGGAA |
| | | CTGGATTCTCGTACCACACTGGACCGAGAAGAAGATTTCAAAAAACGCGAAAATCTTAACAAACGGTTTAGTAA |
| | | GTATGACTTCGCGGATGAATTACTGAAACTTAAAAAAAGCGCGGTTGAAGAGCTGGAAAAACGTCTGAAAATA |
| | | AACAACAAAGAATTAGAAAGCGACTCTGTTTACAAGTCTTTTAAAAATAGATTTCTGAAGATTAGCAGCAGACA |
| | | GAATTTCACGGAAGAGGACTTTATTTTTTTTCTGTGCCTGTTCCTCTCGACAAAAGAGACAATGCAGCTGTTAAA |
| | | CGGTATTAAAGGTAAAAAAAATACAACAACTGAAGAATTTCAGTGGATTAGACGTGTTTTTACCATTTTTAATG |
| | | CCAAACGTTTTCAGAACAAAATTAAAAGCGATAACCCAAAAGAAGCCTTTATTCTGAACATTGTGAACGATCTT |
| | | GCGAAAATACCAATTCATCTCAAAAAATATCTTACTGAAGAAGCAAAAGAGAAATTGATCTATACTGTGCAAGA |
| | | AACCGAGGACGAAGAAGGCAATATTTTAGAACAGAAATCTGAAGCAGTGACCAAGCATGACAAAATGTTTAGC |
| | | TATCGGTGTCTGCAGTATCTGGAACTGTTTGGGTTTGCAAAAAATATCAATTTCAACATAAACCTTGGCAAAGTG |
| | | TTCATAAACAAACCCTACAAGAAGACAATTATCAACGACGAATATGATCGTTTTTTAGATAAAGAAATACATAC |
| | | GTTCGGTAAACTGAAGGATTTTGATGACTCATATTTTGAAGGTTATATCGAAAGAAAGGAAACTGAGAATGGAG |
| | | TAGTTACCACGTTCAAACAACCACTGAAATTTTACTCCCCGAAATATCATTTTTCAAACAATCGTATCGGTATTA |
| | | AGCTGTACAACAAAAATTTGAAACTTGAACTCAAAGAGTATGATGAGGATGGCAAATTTGTAGTTATTAACAAT |
| | | CAACCCGATTATTTTCTGAGTGAGAATGCCATACCCTACTTCACCTACTGTATGATCAATTTTGGAGAGGATAAA |
| | | ACCTTAGGAGTCATTAAGAATTTCGAAACAAATTTCAAACGTTTCCTCAACGACGTTTCTATTGGAAAGAGTATT |
| | | AAAGTGCAGGAGATTGAACAGAATTACTCTTTGAAGATAGGCTGGATCCCGTCATTAATCCGCGATAATCTTTTT |
| | | CACGATAATGATAAGACGTTCGAGGATGTCGTTAAGGAAAAAATCAACTCGTTAAAAGAGGAGACGCAGAAGT |
| | | TGATTGAAAATAACAATAAGAAACCTGAAGATCGCGATCGTAATATAAAGTTTTCGTTTAAAAAGGGGGATCTT |
| | | GCAACCTTCGTTGCGAAAGACATTATCTATTTTATGGAACTGAAAGAGGAAATCGTCAATGGCAAAAAGGTAGT |
| | | GTCCAAGCTTAGTTCCATTGAATATGACGTACTGCAATCGAAACTGGCGTTCTATGGTAAACACGAAGAGGACT |
| | | TGAAACTTTTATTCAAAAAATGGAATCTTAATGAACGCCATCCGTTCCTGAAAGACGTCAGCATGGAAAAAGTG |
| | | GAAGATCGCCGGGGCTTTAAACGGCAGATTGGTATCAAAAAATTCTTTAAGAATTACATCTATCAGCGGAAATA |
| | | CTGGTTAAACGACTTGAAACTGGAGATTAATAAAGAGAACTATCATTTTGTTGACGATTACAAAGTGTGTAAGA |
| | | ATGACACTCAGATTAAAGCTTATGCTTCAAATCTCTTAAACCACACTATCTATCTTCCTAACGATCTGTTTTCTGA |
| | | TCTGATTTTGGAGAATAGTAATTTTGCCGTGGAGAAAGCTAATACGAACTTCTTGATAAGTAAAAACCTGGAAT |
| | | ATTTTGGAAATCAGTGGTTCTACAATAAGGAAAATTATCAACAGGGTCTCGATACTTATCAATCCCATCTTCGCG |
| | | ATAAACAGATTCGAAAAGCGATCACCTTAGATAGATTGTATTGGAACATGTTAAAGATTAATACACAAATACCG |
| | | GAATTCTCACAAATCTTTGAACAGAATAATCTGGCCGCGTATAATTCAGAGCAAACACTGTTAGAAAAGCAAAT |
| | | ACGCATGTCATCAAATTTTAAACTGGCCAAAGAAGATTTCCGTTACCTTGATTTTGATCGAGATTTTGAAATAAA |
| | | GATAGAGGGCTATCGTAAAATTAAAGACTTTGGTATATTCCGCCATCTGATTAAAGATAGACGCGTACCGTCCA |
| | | TTTTAGCCTTTTACACGAAGTATAAGAAACTCGGGTCCATCAATGAGGAGATCATCCGCAACGAAATTCTGGAT |
| | | TTCGAGTATTATAAGATCAGTATCTTGAAACGAGTGCTGGAGATCGATAAGCAGATCTACAACAATCTGATCGG |
| | | GAAGAATATAAGCATTCACGAGAAATTTTCCGAAAACGTAAACAAACTGTACTTGGAAAATCAGAAACTCGCC |
| | | AATAAGATAATAGAAATTCGTAACAAACTTTTACACAACAAAGTTCCAGAGATCAATTTGGAAAACATCCAGAA |
| | | GACCTTTAGTGAAACCTTATTTTTAGAAATGGAGAAATCTTGCAATGAGTTAGAACGTCTCATTTGA |
| 322 | JW13 | ATGAACTTTGAGGAGAATGGGAACAAGTATCTTTTTGGCGCCTTTTTGAACACCGCCTATGACAATTATAATGAA |
| | 145 | GTTATCTCACATATCTACGATGTCATTCGGCGCATAACCAGTAATAATCCTACTGAACAAATTTCTAGCTCTCAG |
| | | GCTTTGGTAAGTGCCGAAGAGCAGACCAGTAGTGATGAAAAAGACAAGAACAAAGAACGAATGTCCTTCGTTT |
| | | GTACGTTTCTGATTACCGGCAATGCAACATCACGCAAAATTGAATCGATGTTAAAACGTGCATTTCCTTTTTGGG |
| | | ATGATCTTATTGAAATCCAGACATCTATGAGCATGCAACTGGATAAGACCGAGTCAATTTTTCAGGTGCAGAAG |
| | | AATTGCGTGGAAGAACTGTTCACAGCTCTGGAATCCTGGCGTAATTATACCACCCATTATATTCACCCAGAAGC |
| | | AATTGCGTCCCCGACCATTAACCTGCTGCTGAAGTCGTGCTTTAATCAGGGTATCAAGGAGATCAAAAAACGGT |
| | | TCAACGCGCAGGACGAGCAGTTAAAGCATCTGTATGAGGCAGAATTTTCTTACAATCGCGAAACCAATAAAGAT |
| | | GAAGTGAAGTGCTATCACCCGGCGAACTATTATAAGTTCACGGATGAGTCTGACCTTCTGACCGATAAGGGACT |
| | | GGCGTTCTTTACGTGTTTGTTTCTTTATAAACGCGAGAGCTACCTGTTGCTGAACCAGCTGAAAGGCTTCAAACG |
| | | TGCCGACGAAGAACGTTATAGAATGACGCTGGAAGCGTTTACGGTTATGCGTTTTCATGCTCCGAAGCAGCTGA |
| | | TGAAACTGCAGCAACAGCAGATTGATAAAGTATCGTTGGGTATATCAATGATAAACGAGCTTGTGAAGTGTCCA |
| | | AAAGAATTGTATGACTGTATAGAAGACGAACAGAAAAAACAATTCGAGGTCTATCCAAATGCAGAAACTGTTC |
| | | CAGATGAACAAGAAGCCATAGGCGAATTAATTCGTTACAAAGATAGATATGAGATTCTGATGTTAAAAGCCCTG |
| | | GAACATAGCAGCGAGTGTAAAAATATGGGATTCTATTTGTCACTGGGTAAGTGCTATATGAAATGCTATGAAAA |
| | | ACATTATATCGATGGGACGACAGACAATCGTTATATTGTACATCCTCTGTACGGTTTTGGAAGATTACAAAATGC |
| | | ATCTACTGATCATAAAAACCACCTGTCGTCGTTTGGTGAAGAGTTACAGACTCATTCTCAATTACCGGTGTGTCA |
| | | TTTTGCGACAGAGGATGATGCAGCGGATAGCCCAACATCCGTTCCGTATATCAGTGAATCTTACCCCTCTTATGT |
| | | CCTGAACAATAATAACATAGGGATTAAGTGGTTGAACAGTAGTGAAAAAACGGAGTATCCCAACTTTAATCTTA |
| | | ATGAAGGTAAAGTTTCTTGTCCAACGCCGGATTATTGGTTGAGCAAGTATGAGCTGCCGGCAATGGCCTTTTATG |
| | | CCTACCTTAAAGAGAAACATAAAAACAAGCTTCAGGAATATCCTTCGATTAAAGAGCTGATCGATCAGAGTCAG |
| | | CCCGAGAATACTAAAACCTCTTCAAAAACTATCAAAAGTCGTCTCGAGGAACGACTGAAAACATATAAAGTTGA |
| | | TGCAGCTAAAAAATTAAAACGTTTAGCAGAGAAACCCGACGGCGTTCAGTCCGGGCGTCTGGCGGATGAACTCG |
| | | CACGGGATATATTATGGCTGCAACCATCCTCACCTAAAGAAGGGGGCAAAGATAAACTTACAGGGGCGAATTTT |
| | | CAGGCGCTGCAATATGCTTTAGCTCGCTATGGGTTTATGAGAACTACCTTATCGCGCATTTTTACCACTGCGGGT |
| | | TTAATTGGTAGTGGCAATGCACATCCTTTTTTAGATAAAATCAATCCGCAGGATTATTCTAAGCTTACTGCGTAC |
| | | TACGTTGGATATCTTAAACAGAAAATCGTCTATATCGACAAGCAACTGGAAAAACTCGCTAGAGGAAAAGTGA |
| | | ACATTCAATTCCACCCCACACGAAAACTTATCAAGCAAAGCCAGATTAATACAATTGAACCGGAAAAAGAGACT |
| | | GTATTTCTGCCGCGCAATATCTTCACAGAAAAAATAGAACAAGCCCTGTGTCAGATCCAGGGTAACTTTAAAAG |
| | | TAATATAGAACGCGCTAAAACCAGCGGCAAAGGTGTCAATGCATCCAAACTGATTCACTTCTACCTTGAATTGT |
| | | ATCTTAAAGACGCCGTAACGGAGTTTTACAACATAAAACGTAAGTACTCCTGTCTTTGCTACCCGTTGATTCCTA |
| | | GCGAAAAATACAATCTTAAAGAATATCAGAACACCGAAGAGAGATCAGAGCGTATCGACCGGATTAAAGATTT |
| | | TTACAACTTTAAGGAAGTGACAAAGAAGGCATGCAAAGGCCAAGAATTGAGCGAAGATGAGAAGAAACTGTAC |
| | | AAAAAGTACATCGAACTCCAGAAGGTGATCGATAATGAGAAGATGATTCGCTTACGCAAAGTACAGGATATAA |
| | | CTCTCTACCTGTGGATGCGCTTATTCATTGAAGAAAACCCAGAGCGTATTGTGTTCAATAAAAACGACCGACCA |
| | | GAGAATAGCTTATTAAAACTGAAAGAAATGGACAATACAATTCTCGACCACACGACGGCCCGCAAAATCAATA |
| | | TTGATACCCCTAATGGAAACGTCACAATCGAAGATGAATTCAAGATTAAAGATTACGGTCGTATTACCACACTC |
| | | ACTACCGAAAAATTACCGCAGTCGTTAATTAAGTTCATAGGCATTTTGAACAAACCGTTAGACAAAAAAGATCG |
| | | GCCGTCATTAAGCTATTCATATATCTACCATGAAACGAATGCTTTCTATCGATATCGCCCCGAGATTATTAAAAT |
| | | GGCTCAGGACATTGAAAACAAAATTATTAACGAACTCAAAATAGACATACAACCTGAAGCCGAGGGTTATTATA |
| | | ATTTTCGGCAAATACTGGAAGAAATCAAAGAGAAATCCTCAGATATTAATTTGGAGTTACTGATAAAGATCCGG |
| | | AATGCCTTTTGCCACAACGAATATAAAGAGCTCGATAATGATCAACATAAGTATCTCTCAAGTCTGTTCAAACC |
| | | GATAGCCGACATCAAGCAGACGGCTACTCTGGCGTACCTGCTGCACATGCTCTTTGAAACCGAATACCAGAAAG |
| | | TTATGATCTTAAAATAA |
| 323 | JW13146 | ATGAGTATAATGAACATAATTACGGTACTGAACCATATTCACCAGATTGCAGGTCTGAAACGAAATGAGTTAGG |
| | | TGATGATGATAACATCTATTCACATCCTGTCCTCAAATATATTGCTCCAGAGAACAATAGCACCACCCTGCCGGA |
| | | AAAACGGGACCTCATTAAGGAATTGCTTTTAGAATATCTCCCCTTTTTAGAGGCGATGAAAGACTGCTACAAAG |
| | | AAGTAAAAGTAGAGAAAGATAAACGCAACAATAAGTATGTGAAGGATAAAAAACAGGTATTCATCCGGAATTA |
| | | TAGCGACATCTATTGTATCTATTGGACGCTGTACAACATTTTTAGTACCTTGATCAATTACCGCGATAAGAGTTG |
| | | TCATTATCGTTTTATTCCGTCTAAAGATCAAGAAGAGTATTCCAAAAGAACAGAATATGATACAGTTCGGATTAT |
| | | TAACAAATACTATACGTACGCCCTTCGCAAAACGAAAGAGAAATATGGTTATACCACCGAACAGTTGAGCTTCA |
| | | TACAAAATAACAGATACACGGACGATAAGAAAGTGAACTTTAATTTCTTTCTTTCCATGCAGTCTTCGAACAATA |
| | | ACCTGTCACATGTGGGTGTAGCCCAGTTAATATGCCTGTTTCTCCAAAAAAAGGACGTGGACAATTTTTTAGAAA |
| | | ACCTGCCTATCTATGACAATCGCTATTGTCTGGGGATTGATGAACACATGATTATTAAACGTTCACTGGCGCTGC |
| | | ATTCTATTAAACTTCCTAAAGAGCGTCTCAACTCAGAAAAAAAGGATATGGCGATTGCAATGGATATGCTGAAC |
| | | GAACTGAAGCGCTGTCCTAAAGAGCTGTTCAATACTCTGCCTTTCGATAAACAGGAACGTTTCCGCATTATTAGC |
| | | TCGGATCATAAAGAAGTCTTGTTGATGCGGAGCACCGATCGGTTCGTGCCCCTGATTTTGCAATATATTGACTGC |
| | | AACAAAAAGTTCAAAGACATCAGATTCCACGTCAATATGGGCAAACTTAGATACCTTTTTTCACCGAATAAACT |
| | | GTGCATAGATAATCAGGAACGTGTTCGCATGTTAGAGCATCTTCTTAACGGGTATGGCCGTATAGACGAGGTTG |
| | | AATATCTGCGTAAAGCGCCGAATGGTACTTTTGGAAATACAAATATTCCAATTAAAGGTTTTGGCGAGATTGAG |
| | | CGGGATAGCGCAGACTCTAATAATTATCCATACATCGTTGATACACATACGCACTACATCTTAAACAACAATAA |
| | | GGTTGAATTTTGCTTTTGTGAGGACAGCAAAAATAAAAACGTATTTCCAACTATAGAAAAAGAGATTAACGGCA |
| | | AATGGTATGTGGAAAAAACCGCCCCTCATTGCCGAATTAGTTTTTTTGAGATACCCGCTATGGCCTTCCACATGT |
| | | TTCTGTGTGGGTCCGAAAAAACCGAAAAACTGATCAAAGACGTGTATAACAATTATATCTCGTTGTTCAACGCTT |
| | | TAAAGAACGGAGCATTGACAGAAGAGAATTATAAAGATTTTAATATCCCGGAGTGCGACATGCCCAAAAAAAT |
| | | CCTCGATTTTCTGAAGGGTAAGGCGGAAGGAAAAAGTATCGACGGATACGTTAAAAACATTCTGAAGAAGGAG |
| | | TTAAAAGACACGAGAAAACGCATCGAACAAGCACCATCGGAAAAAGATCAGATGCCGTCTAAAAGAAATAAAA |
| | | TTGGGACCAAAAGTTATAAACGCGTTCTCACTGGAAAACTGGCTGATTTTCTGGCCAAAGATATTGTTAAGTATC |
| | | AGCCTACACTGTGTGCGGGCGATGATTATGGGATTGATCGTATGACAGGTATGAATTATCGTATTATGCAGGCA |
| | | ACTATTGCTACCTACAATGACGACGATGACTTTGATACATTTTACAATGTTTTTAAAATGGCCGGCTTAGTCGAT |
| | | GGAGATGAACGAAAAAATCATCCTTTCTTAAAAAAAGTGTTGCTGAGTAAACCCCAGAATACAGTGGCCTTCAA |
| | | TATAAAGTACCTGAAAGAGAAGGAAATCTATCTTCGAAACATCGAAAAAAAGAACATCATTCCGCCGTTCGTCA |
| | | ATCGTGAAAGAAATAAGTGGTGTGAACGCGATTGTGAGTATTATCGCATTTTAGGTGAAAATCTTTTAGACCTG |
| | | CCAATAGAACTGCCCCGTCAAATGTTTTACAAAGATATTCGGGCGCAACTGGAACCTTTAATGCCAGAAATAGA |
| | | TTTTTCTCAGACCAATACAACTTACCTGATAGCTGAATATCTTAAACGTGTACGTGGCGATGATTTCCAGGAATT |
| | | TTATTCATGGGAACGGAACTATCGCTACATTGATTTTCTGAAATGCATTCGCGATGATAATGGTCGTATCTGCGC |
| | | ACAGTATACTACAACAGAAGAACGCGAATCACTTTGGGAAGATTCTAAAAATCGTACGGCAGAATATAAACGG |
| | | AGCGAGGAACAAAAAAACGAGAAGAAAGATAAAAATTTTGAAGATTCCCTCGAGGAGCGTATCAGCTCATCCC |
| | | ATATAAAGTTTCAGAATACCGAAAAGCATATACGACGTTATAAAGTCCAAGATGCCTTATTATTCATGATCGCC |
| | | GAAAAACAGTTTGGTAAGTACCTTGATGATATTAAGGCGAAAAATTTCAAACTGAAAGATATTATGCCGGATAC |
| | | CGACAAAGGCATCTTATCCGAAACTATGCCGATTGACTTTACGTTCACCAAGAAAAACATCAAATACAATATAC |
| | | ACGCAAAAAACTTGAAATTCAAGGAGTACGGCGACTTGTTTATCTTAGCTAATGATAAACGTTTGGAATCTCTGT |
| | | GGAAGATTTTGGCCACCGATACGGTGAATAAGGAAGAAATCAGTGAGGAATTTGCGAAATATGATTTTTGTCGC |
| | | CCGGATATAACTAAGCTCGTTCTGGACTTCGAGAAGGATGTCCTCGAAAAATACCCGGAGATCATTGAAGAGGC |
| | | TGAGAAAGAATATAAGAAATTTGACTTCAAGTTTATTCTCGACTGGCTTATTAACAAGAAAAAATTAAACTACG |
| | | GGATCCGTAACAAACTTCTGCTGATACGAAATGCCTTTAATCACAATTCGTATCCAGACAAAAAGTACGCAGAG |
| | | GTTAGAGAACTGCCGGAAATAGCTACTAATCTGAAAAAAACTTTTGACGAGAATGCGAAGAAGTATGAATAA |
| 324 | JW13147 | ATGTTTGATAATGAACAGAAAAACCTCGAAAAAGAACCTTATTGGGGCGTTTTTCTTAACCAAGCGCGCCTCAA |
| | | CGCCTATATTGCTTTGCGTGATATTAGCGAACGCTTGGAAGAAAACGCGGCCGATGAGGATTCTCTGTCCGAGT |
| | | GGCCTGTATTAAAATATCTTGATAATGATACTGACGCAGTGAAAAGTCGCCGCATATTCGACCTTGTTGAAAAA |
| | | CACTTCAGCATGTTAAAAATTATCTATGGTGGCGAAAAAGAGGGAGATCTGGTCAAACGATCCAAAGAGTACA |
| | | AGATCATACTCAAGTGCTTATTCCGCGCGCTGAACTTCTACAGAAATAAGTTTTGCCACATGTATAGCGGTAATC |
| | | GCGCACGGAAGTACAACGAGAAAGAACTGATCAAGTATCTTGAGGATTGTTTTGATGCCTCGGTCCGTAAAATT |
| | | AAAGAGTTACGACGTTTAGATGAAAAAGACGTACTGCATCTTCGGCGGAAAATTGCCGAAGGTAAAGATGCCA |
| | | ACAAACGCGTTATTGACAACCCGCAGTTTCGCTATCCCTTCAAAAATGAAAAGGGTGAACTGAACGAGAAAGG |
| | | ATTGTACTTTCTGGCGTCAATTTTCTTAGACAAGAAAGAGGCTCATGAATTCTTGAAGAAGCAAGAATACTTTAA |
| | | GAACGACTCGGAACCTAAGTACCGCGCCACTCTGGAATCGTTTTATCATTATCGTATTAAACTTCCACGGCCGGT |
| | | TATCGAAAGCGATGTAGACAAAAATGGGTTAGCTTTGGATATGCTGAACGAATTAAAAAAGTGTCCAAAGGAA |
| | | CTCTTTGATTTGTTGTCTAAAGAGCAGCAGGAAAAATTCCGCGTTGTCGATAGTGAAGATGCGGACGAAGAAGG |
| | | GAACGAAATCTTAATGCGGCGTTATTCTGATAGATTTCCCTATCTTGCGCTGCGGTATTGTGATGAAAATCAGGT |
| | | CTTTGAACGTATTCGTTTCCAAATCGATCTGGGTCGGTATTACTTTAAGTTTTATCCCAAAGAAACTATTGATGG |
| | | CAAAACGCAACAACGTTCCCTCGATAAACGTTTAAAAATTTTCGGGCGCATCAAGGATGTAAAAAGTAAAGTGG |
| | | AACAAGAATGGTCAGGCATAATTAAAAGTCCAGATACAATAGAAGAGAATCCGAATGAACCATATAAGCTGAA |
| | | AACCACGCCGAGATACAATATTGTAGACAATCAGATAGGATTTGTAATTACCGGCGATAAAAACCTGCCGGACG |
| | | TAAAACGTCCTGATGGTCGCATTGAACTGGAAAAACCGGACGGGTGGCTGTCCATCTATGAACTGCCTGGCATG |
| | | TTATTTCATGGTTTGAAGTATGGTTTCGACAAGACCGAACGTATGATAAAGATCTACATAGAAAAGCAGCGTAA |
| | | AATTTGCAAAGAGATATGCGAGAAAGGTACTATTACTCCAGATGATGGCGAATCCATGCCGGAAGCCTTAAAAG |
| | | GCGGTGCCAAAGCAGCAAAACGTAATTACAGCGAAAAAAAATTAGAGCGTATGTTACAAGATACGGAACAACG |
| | | GATTCGAGCCATACAGACGACACAGAAACGAATGGATGAGCCTGGGAATAAACCAGGCAAAAAAAAGTTTTTT |
| | | GATATACGTGCCGGCAAACTTGCTGATTTTCTGGCTCGCGATATTATGGCGCTGCAACGGTTTGATCCGGCTAAA |
| | | CACGGGAAAGACAAACTTACGGCTATTAATTTCCAGGTGCTTCAGGCGACTCTGGCCTTTTATGGCGCAAAGAA |
| | | AGACGTAATTGAAGATATGTTTAAAGGTATTGGTTTGCTCGAGGGTGATAATCCCCATCCGTTTCTGAATCAGAT |
| | | TGATCCGGCACAATATAACTCAATTGCAGGGTTTTATCAGGCGTATTTGCAGAAAAAGCGTAGTTATTTGGAAG |
| | | ATTACCGCAAAGAAGAGGAATATGACGAGCAGTTTTTACGTCCGAAAAGACAGAGATATGCCCAAGAAAAAAG |
| | | AGAGATCAAAACCGTTGCTCGCCAGCTCCTGGACAACCCCGTCAATGTTCCAAAAAATTTCTTCAAGAAAGAGA |
| | | TAGAGGAATTTGTGTTTAGTCAGGACCCAAGCCTGAAGAAATCTAAAATGAATACTGCGTACATGATCCAGGCA |
| | | CTCTTTGAGAAACACTATGGTCGTCAACAACCGTTCTATTCGTATAATCGAACGTATCCCGTTGTGTCCAAAGCA |
| | | ATCGAGTATGGAAAAAAGGGAAAGAATAAGAAAATCGCGAAGGTCTTGATGGCAATCGAGCCTAAGCTTAATT |
| | | ACATGGAAATCAAAAAAATCGTGAATGAAATGCCGGATGGGCAATATGAACCTGAGAATCTTAAACGTAACCT |
| | | TTATGAAGGATATAAAGACTACGAAAAAGATGAAAGAATCATTCGTCGGTGTAAAGTTCAGGATGTTGTCAGCT |
| | | TTATGATGGTGGAAGAAACCTTAAAAGACCAGCTGGATTTTAATGGGAACGTGCTGACCTTAGAGAAGATTACC |
| | | CCCTGGGAAGCGTCTCCGTTCAAAAAACCAGTTCTGTGCCATACAATAATTTCAATTCCGTTCAACACCAAAGGC |
| | | GGTCATACGGATAAAGATTATGTTGATTTTATCAAGAACAATTTCGAAGGCAGTTACGATTGTGAGCCGAATAA |
| | | AATCATACTGAAGTACAAAGTGACAAGCAAAGACACTAAACTCAAAGATATCGGTAAGTATCGTATGTATTCAC |
| | | ATGATCGTAGACTGCCAGGTCTGCTGATATGGAAATACCGCCCAAATGATCAGAATGGCAATGAGATAAAGTTT |
| | | ACAGAGATCGAGCAGGAAATTAAAGCATTCGAACGGCGCCGAATAGAGATCGCTCAGTGTCTGTACACACTGG |
| | | AAAAAAAAGTTATTGACTCTTGGTTCACACAAGACGAGCTGGGAGAAGAGCACATTCCCTTTAACAAAGTGATT |
| | | GACGTCATTAAGGCAAAAATGCCTAATTTTGAAGACAAATGCAACGTGTTACTGAAGATTAGAAACGCAATTAA |
| | | TCATAACCAGTTTCCTGTGTACGAACAGGCCATCCAGACAGCTCCTGGCAAAGAGATTGCTGGAAAAATGTTAC |
| | | GCATCACCGAGTCATATATCGAACAGATAATGGCAAAAATTGACCCGGACTTTGGACGAACCGAGGATGCGGA |
| | | ATCTTCACGTTAA |
| 325 | JW13148 | ATGATCAAAAAACCGGCTAATCGTTTTGCATTACCCAAAGTCATAATTAGCGAAGTCGATTCGGAAAACATCTT |
| | | GGAGTTCAAAGTTAAGTATGAAAAACTTGCTCGGCTTGATCGGTTTGAAGTCGAAGCAATGCATTATGATGAGA |
| | | AAAACGAAATAATTTTTGACGAGGTGAAAGTGAATGACGGCTTAATCGAAATCGTTTACAAGGAGAATAACAA |
| | | AAAGTTAGTGGTGGAGATTGAAGGCAAAGCTTATGAAATCTCAGGTCAAAAAATAGGCGGCAAACAGAGATTG |
| | | TTAGAGAATCGTGTGAGTAAAACAAAAGTGCAATTAGAGCTGATGAATCATATTGAAGATGGAGAGGGGAACA |
| | | AACGGGTGTCACGTACAGAAAGAGAGTTGATTGTTTTGGGTGATATTAAGCTTTATTCCCAGATTGTAGGGCGC |
| | | GAAGTTAAGACAACTAAAGAGATCTATCTGATTAAACGTTTTCTGGAGTACCGTTCTGACTTGCTCTTTTATTAT |
| | | GGTTTTGTTGATAACTTTTTTAAAGTCGTTGGGAACGAAAAAGAACTGTGGAAAATCGATTTTAATACATCTCAC |
| | | AGTGAACAGCTGATTGAGTACATTAAGTATACCTTTAACGACAACCTGAAGAATGATCGTCAGTATCTTAATGA |
| | | ATACGTGACTAATGACGTGCAGATTCAGAAAGATTTTAACAAGGTAAAAAATGTTTTCTCCGAGTTGCGCCACG |
| | | CACTGCTGCATTTTAATTACGATTTTTTCCAGAAACTGTTCAACGGCCAGGATGTCGGGTTTGACCTTGATATCG |
| | | AATTTCTCAACCTTTTCATAGATAACATCGATAAGCTTAACATAGAGACGAAAAAAGAGTTCATAGGAGATGAA |
| | | AAAATTCGACTGTTTGGCGAAAATCTTTCACTGGCGAAAGTGTATGAACTTTATTCTCACATTTGCGTGAACCGT |
| | | GTTGGGTTCAACAAGTTTATCAATAGCATGTTAATTAAGGACGGAATTGAAAATGAGGCTCTGAAAGATAAGTT |
| | | TAGCACCAAATTCACCGGTAATGCCTATTATATTGATATTCATAATAGTCGGGAGTATAAAGACCTCTATAAGA |
| | | AGCACAAACGTCTGGTGATTAATGTTAGTACCCTTAAAGATGGCAGAGCAATTCGCCAGGAAAATAAAAAAATC |
| | | GCCGAACTGAAGAAACAAATGACCACTATGACGACTACCAACAGCCTGGCGCGCCTGGAGTGTAAACTTCGGTT |
| | | GGCCTTCGGCTTCCTGTACAATGAATATAATGACTACAAAGCGTTTAAGAATTCCTTTGACTCCAACTTGAAAAA |
| | | CAACCAGTTTGACGTTTCTAATGTAGATACGTCAAAGGCATATTTCCTGTCTACTTATGAAAACAGAAAACCACG |
| | | AACCCGTGAACGAATTGATAAAGTTTTAAAAGAGATTGAATCGCTGGAGCTGAAAGGACTGATTGCAAATGATC |
| | | CATTACTCAAGTTTATACTCCTGATGTTTGTCTTCATGCCCCAGGCCCTGAAAGGTGAATTTCTGGGCTTTGTTAA |
| | | AAAATACTATCATGATGTCCACAGTATCGAGAAGGACACAAAAGACAAAGAAGAGGATCTGATAGAATTCATG |
| | | CCGCTGAGCCTCAAATTAAAAATCCTGGGACGCAATATACGCACATTAACTCTTTTCAAATATGCCTTAGGATCA |
| | | CCTATCAATTACAATTCAACTGATGAAGTATTCTATGTAGAAGGAAATCGTTATGGAAAAGTCTATAAACAATT |
| | | GGGTATAAGCCATAACCAAGAGGAATTCGATAAAACATTGACGGTTTCCTTATTACGGTACTACTCAGCACTCTT |
| | | CAAACTGGTCAATGATTTTGAAATCTATTCTTTAGCGAAAGGTAATCCTACAGTGGTTAATCTTGATGTGCTGGT |
| | | AGACGATTCGTCTAGTCCGTATAAGTTTCGCGGTTTTTACAATTTTGGTAATATGATCGGGCAAATACATGGGCT |
| | | CACGCATAACCAGATCAAAAACGAAGAGATCATGATAAGAAACAAAATTGCCCACTTTGACATAGAAATGTTG |
| | | CTGAAAAAGCCACTGTTAGCGCAAATTAAACTTGATGTGCAGCGCAAAAATCTCATTAAGTTCATTGAAGACCG |
| | | CGGTGATATGAAATCCGTATTAGGCTATGATGCTATTAATGACTTTAGCATGAAAATGGTGCATCTGCGTACGA |
| | | AAATCAAAGTAAACAGTGATAAGCTTCAGATAATGATGGGCCTGCTGACCAATGTTAAAACCCCGAACGACTTT |
| | | TACAATATCTACAAAGTAAAGGGTATTGAAAGCATTAATCAACATCTTTTGGATGTTATTGGTGTCACGGAATCG |
| | | GAAAAGAAGATTGAAAAAGAAATCAACGAAGGTAATAAACGAGCGGTAAAGTAA |
| 326 | JW13149 | ATGATGGAAACCATTAAACAGGAAATAGGTAAAGAATACAATCCTTTTAAGACCGAGGATAAGCATTATTTCGG |
| | | CGGCTTTTTTAATCTGGCCGATAATAATATTAAGGAAGCGTTTAATGAGGTTTCGATTCGGCTTAGTCAGAAAGG |
| | | TGCCTCTCCCAAAACATTAATTGAAAAATACACCAAGGAAAATGTCAGTCTTGTAGACTATGAGCGCTTTGTTAT |
| | | ATTATTGTCTGATTATTTTCCAATAATCAAGGAGATCGACCAGATTAATAAAGATGAAAAAGATAATAAAGGGA |
| | | TCCTGATACCCAAAACAAAAAATGACCGTATTAAAGATTTTGAAGTAATTCTTGTCTCCATGATCGATGCGATAG |
| | | AAAATCTTCGTAATTATTATACACATTTCTATCACGAATCCATCGAGATTGATAATAAGATGTTCTATTTTCTCGA |
| | | TAAAGTGCTCTTTAAAACCGTGTTGGACACGAAACGAAATTACTTGAAAGAAGATAAAACAAAAGAGATGATA |
| | | AAGAACACGCTGAAAGAGGATTTTAACAAGATCTTTAACCTTAAAGTTGACGAGTATTTGACCAAAGACAACCT |
| | | GACGTCAAAAAAAATAAAAAAGGCTCGGAAGTATGGTAATAGCTTTGATATAGGTTTGACTAAAGAAATTACTG |
| | | CGAGTATCTACAATGATGCCATCAAGTATTTCACCTATGATAAAAACGAAAAATCCATTCTGTCAGATAGTCGC |
| | | AAGACTGCGTTTAATGAACGCGATTATTTTTATCGTGATAAGAATTTCGATCTGCCAATTAGCTCTAGCGGCATT |
| | | ATATTTTTGCTGAGCTGTTTTCTGAACCGTAAAGAAATCGAAGACTTGAAAAGTAATATTAAAGGTTACAAAGG |
| | | GAAGGTTACTAAAAATGAAGAACCAACATTAGAAAAGAATTCCATTCGCTTTATGACTACTCACCGCATCTATT |
| | | CAATATGGCACTATAAAGGACTGAAAAATAAGATTAAAACGAGCGAAAGCGCCACAAAAGAAACACTGTTGAT |
| | | GCAAATGATTGACGAAGTATCAAAAGTGCCTAACGTGGTTTATCAAAACCTGAGCAAAGACCTGAAAGACTCCT |
| | | TTATCGAAGATTGGAACGAGTATTACAAACATAATGAGGAGAATACCGAGAACACGATTAATAGCAAAGTCAT |
| | | CCACTCTATTGTGCGTCGCCGGTACAAGGATAAGTTCAACTATTTTGCTATTCGGTTCTTAGACGAATTTGTGAA |
| | | TTTTCCGAGTTTACGTTTTCAGGTGTACCTGGGAAACTATCTTGTTGATTCCCGTCCTAAAGAAAGTGCAAACGT |
| | | CATTACTGAGAGAGAGATTAAGAAAAAAATCTTCGTCTTCGGTAAACTGAACGAAGTTAATCAGCTGAAAAATG |
| | | ACTTTTTCAGTAAAATTGAGGAAGATAAACTGGAAACCAATCTTGAAGTGTTTCCGAATCCGTCTTACCATTTTC |
| | | CAATGGAAAACTCGGAAGAGCTCAAATCGGCGAACAAGATTGGAATCTATCTTTCTGACATAGAAAACTTGCTC |
| | | GAACCGTTTAAGAAACATCTTAACAAAAATACCTCACAAGAGAAAATTTCGCTGATCGAAGACATTACCCAACA |
| | | GAATGAAAATATCAAAATTGGCCAACCGTTAGCCTACCTTAGCATGAATGATATACACAGTGTAATCTTTGAAG |
| | | TGCTTAAAAATCCGATTATCAAAGATGGCAAAATAGACGGTAAGTCGGTCGAGAAAAAAATAAAGAACCAGAT |
| | | CTATAAACAGATAAACGAGATCAAGAACAAAAAGGAAGAGAGCAAAATTATCAAAAACTTTCGTAAAAAAACC |
| | | GAAAGCGACTTGGACCTTAAAAAGATGATTGATGATCTGATCAAAGAAATAAAAATCACTGACGACAAGATCA |
| | | AAAAACTGGACGAAAACAAAAAAGAGTACTTTGACTATCAAAAAAACAAAACCGCCAAAAAACGCAATTACAT |
| | | ATTACAGAATTCTGAAAAAGGCGAAATTGCAACCTGGCTCGCTAATGATATTAAACGATTCTTTCCAAAAGAGT |
| | | TCAAAGAAAAATGGAAAGGCTACCACCATCGCGAATTACAGCTGTCAATCGCGTATTACGATACGCAGAAACA |
| | | AAATGTCAAACTGCTCTTGTATGGATTAGATTATCGCAAAGAGATCCCGATGCTGGATTTCTCAAAGCCCAACTT |
| | | TTTAGATTTTTACGAGTATTATCTGAAAAAACGAAAGCCGCAATTATACAATCTTTTATCGGATCTTGAAAAATT |
| | | AGAGCGCGGCGAATCCATTAATAAGGAAATGCTGCTGTCTAAGTACTTTAAACTGTTCCGCAAGAGTAATTATC |
| | | AGAACAAAAGCTTAGATGATAAAATTAATACCGCGCTGGCAAATCCTATTTTTATCGAACGTGGTTTTATGGAT |
| | | GGTAATCCAACAGTAATACCGAATACAACAATTAAAGGGAATGAATCGAGATTTGCAAATTGGTTCGTGGCTTA |
| | | CAAACAGTTTGATGAATACCAGAAGTTTTACAATACCGAAGAATATTTCCTCGAGTTAAAGGACAAAACCCCTA |
| | | ATGAAATTAAAAAAATTCAATCACAGATCTACACGCAGAAAAAGAACGACTGGGCAATTTGGAAGATGATCTC |
| | | ATATATTTTTAAAGACATCTTCAACCAAGATCTTCAAAACGTGTCACTGTCTGAGCTTTATCAGAATCGAGAACA |
| | | AAGATTGGAGAATGAGAAAAAATCTAAAGAAGGAGAGCGTAAGCAGAACTTCTTTTGGAATAAAACGGTTGAT |
| | | TTGCAGCTGAACAACAAAATTAATATACCAGAGGTTAAACTGAAGGATATCGGCAATTTCCGCAAGTATGAGAA |
| | | AGATGAGCGGATTAAAGTTTTTCTGTCATATAACGATATTACGGATTGGATGGCTTATCTGCCTAATGATTGGCA |
| | | AGAGAAACATACGATTAAGCCGATAAACGTAATAGATATTCAGATTGACAAGTACGAAAAAATCAGACAGCAT |
| | | CATCTTTTAAAGGAAGTTCAGAATCTTGAAAGCGAAATCTATAACAAGGCTATTAACAAAGAAGAATTACTGCA |
| | | GGAAGATATTAAGGGGAATAAAAACCCCAACTTCAAAAAGTATATAGTGAATGGGCTTCTCAAACAGATCAAA |
| | | GGTCTGAACGTTGAAAACTTCAAAATTCCGAACAGTGATAAAGAGTTTAATGCACTGTCTGAAGAGACATTGAG |
| | | ATCCTATACTGAATTAGAACAGAAGGTTACTCTCCTGGTCCTCATTCGTAATAAGTTCGCACATAATCAGCTGCC |
| | | TAATAAAGATGTATATGCATTCACACAATCCATACGGAAGCGTCAGAAAAACGAAACGTATGCCGAATATTATT |
| | | TCAACCTGTTTGAGAAAATTAGAGGAGAGATTTGA |
| 327 | JW13150 | ATGGAAGAGAATAAAGTCCGCTTTACAAACACGTCCAACGTTAAACGCCCGAAGAGTCTGCTGAAACAAATGG |
| | | GGCACAAAAGTACATTTCTGCTGGATGATACTTTAATTGTAACTTCTGTGGCTAAAGGTAAAAATGAAGATCAA |
| | | AAGGGTAAAGAACAAGCCGCATCCAAAAGTAAAGTTGCTCCGCAGTCACATATTGAGTTGTTAAGTACTATCGA |
| | | TGGAGAAGTACTCGGCGGTCGTAAAGAATTATTAGCTACAACGGTTAGCCGCCAAGAAGTTACGATTTCCGGAA |
| | | AAATCTACAATCTGAATACCAAAACTCCGGAAAGCACAACCGTAACCATGGCGAATCCTGCTGTTCTGTTACAG |
| | | AAAAATAGTAGCACTACTCAAGTTGCGAGAAAAACCGATTATCTTGGCATCAAAAGTGCTTTAGAGAAGGAGTT |
| | | TTTTAACGATTTTTCAAACTCCGGTTTTAACGACAACGTTCGCGTTCAAATCGCTTACAACATTCTGGATATACG |
| | | GAAAATCTTGGCAACAACCATCAATAATATAGTTAGCATGTTTTACAATCTTGATAGAACCACAGGTGACATTG |
| | | CAGATGAGACGAAGAAAAGCACAAATACCGACATTATCGGCATGATTAAAACATATCTCAAATATGACCAGGC |
| | | AAAAAACTCAAATGACCCATCTATTAAAAAAACCTTTAACAAAGCAGAAGAGCTGCTGATTAACACAAAAGCG |
| | | TATCACACCTATTTTGACCGATTATTCACGACCCCTACTCGTCAGGCTTTTAAAGCCGGTAAACTTAAAGATACA |
| | | AACGATAAAAAATCAAACCTTCCATGTGAATTCTCTAAACTTAGCGAAAAGGACCAAGAGGAATTCAAAAATG |
| | | AAGCGATTACGCATAATTATGACGTTCTGCGATTACTCGGCTTGGGTCGTCAGCTTGTGGTGCATGAAAAATACA |
| | | AGTCTGACGAACACAATAAAGATAATTCGATCGAGTCCCTGTTCAACATTGACAAGATTATAAGAAACAGCAAT |
| | | GATACCATGGACCTTCTGAAACGGCTGGATAATATCTACCTGGAATCGGCCGAACAGATTGATAACAGCTTTAA |
| | | GAAAAGCTCAGCGACAAATTGCTTAATACTCGAAGAGCTTTACAAACGCATTGGAAAAGCAAAAACACAGGCT |
| | | GAACTGTACAAGGATTATTATCGTTATGCCATTTTAAAAGAAGACCAGTGCCTGGGAATCTCGTTTAATCGTATT |
| | | AAAGAAGCGGTATTGGAGAAGCTCAAAGAAGAACAGCGCTATAAGAATTTCGAGTATCGGAATGATAACAAAC |
| | | GGTTCTACACCTTGTGTAACTTCGTACTGTGGCATTATATGGTCGATCTTCGGGACAGAAATGAGACCCGCGCAG |
| | | GACATCAGCAAACGGATAGAAATGAAATAGAGGAGCTGAAGTCTAAACTTCGCGCGTGTTGCGATAATAACGG |
| | | CGATGGCGGTGAAAACCAGAAATATGCCATCTACAAAGAATTCGTTAATTTTCACTGGACGGACTTGCGTACTA |
| | | GTATCAATACGTTGTATGATCTGTGCGTCAAATATAAGTATACTGCAAAAAATTATCGTATAGACTCCAAGATTC |
| | | AGATCGACAATCAGTTATCTAGCTCAGCAAACAATGTCAAGACCTTTGTCAAGTACATCTATTTTTTATCCGAAT |
| | | TTCTCGACGGGAAGGAAGTGAACGTTTTCTTCAACGAATTGGTGGAGAAATTTTCGAATATTGCAGAAATTGTG |
| | | ACCACGGTGAACGACAATATTAATAATTCGTCAAAGAAGTCACCCAATATCTCTTTTCTCCCGCAGTATTCATTG |
| | | TTTCAGGAAGCTGGTACCGTAGCGGATCAGTTACGTAATGCTCGCAATATTAAACATGCGACTCTGCGTGCCCG |
| | | CATTAATGATAAAGTTGCGGATAAAGATAGCAAAATGTCTCCGTCGAAGCAAACAATATCAGATGCTCTGTACA |
| | | TGCTGATTGACGAGAACGATACCATTGAAAATTATAAACAGCTGATATGGGACGAGAAAGAATCTGGCACCTG |
| | | GGTGAAGAAGGCTACTGGTAATAATAAGGTGCGCAACTTCATCATCAATAACATAATTATGAGCAAATGGTTCA |
| | | TGTACATCTCGAAATATTCAGACCCTCGCAACTGTAGCAAAATTATGCATAATAAAGAGGCAGTGGTTTTTGCTA |
| | | TGTCAAGTATTCCGGATGCCCAAATCGAGAAATATTATAAACGTGTGACGGCCAAAAGTGTACAGTATGGCAAC |
| | | AAAACCGCGGAAGAAATGCGTAGCATTGTAATAGATGCGTTAATGAATTTTTCCCTCAAGCCCGTTTTAACGGG |
| | | AGTTGCCAATAATGATTATTCCAATGAAAACCGGGAACGTGATATCGGGATTATTCAATTGTATCTTACGGTCGC |
| | | CTACATTGTGACAAAAAGTCTGGTGAACGTCAACAAACGATTTTTACTGGCATTCTCTTGTCTGGAGCGGGACGT |
| | | TCCACTGATTTTAAACGGGAAGAGTTTTAAAGATGCCAACATTTTAGTTTTGAGCGAAAAGTTTATAGCAGAGG |
| | | ATCAGGAGATAGAACAAAAATATAAGCTCGCCAAAAAAAATCGAATTACGCCTAATATGTCAAAAGAAGACGT |
| | | CAAAAATGTGTTTAAAGAGTTGAACGCAGAATATAAGTCTAAACATTACGCAGAATCATTAACACGTCCACGTG |
| | | ATCCCGATTCCAAAAAAGATAAAAGTTGCGCGTACCTTGTGAATAACCTGAACGAAGCCAAGAAAATTGAGAA |
| | | CGTCCTGATGGATTTTAAGAACAAAGTCGATCACCTGAATGTAGTAAAAAGTGCGCCGGAATATATGTCGAATA |
| | | TCAAGAATATCGATAGTTTCTATGGCATCTTCTGTTTCGCGCTGCAGAACATACTGGCCGATAAAATGATAAAGT |
| | | GGTCTGTCAATGAAAAAAATTCTAAGGAAGATGTGGAGATAATCAATTCGTATGGGCAGGAACTTAAGAAGAA |
| | | ACTTGATTCCCGCCATACTTTTGATAGAGATGCAATGTGGATAATTAATATGCCTTTTGCCTATAATTTTCCACGA |
| | | TACAAAAACCTGAGCTCTGAGTATCTGTTCTACGACAAAGAATACGAGAAAACTAAAAAATAA |
| 328 | JW13153 | ATGAAAATACCTCAGATTATTGAGAATAACAAACATCTGTTTGGGGCGTACTCTACAATGGCGTTGTCAAATAT |
| | | CCGTAATATTCTGGATCATATAGCTACACTGGCCGATATCGAAAATGACTTCTACTCAGACTCCGACTCATATTG |
| | | GTACCATCCATGTATTAAAATTATTGATCCACGTAACAATTGCACAGACGCAGCTAAAGCCGACTTCGTGATTG |
| | | AAAAAATTAAGAGTCACTTCCCTTTTGTCCCTATCGTAGCGGAAGCCCAACGCCAAAGCGATATCTTACGGGCT |
| | | AAAAAACAGCTGGATATTGCCGTGAGAAATCGTGACTATCAGAAGCAAGAGGAACTGAAACACAGACAAAAAT |
| | | CATTACTTTCCGTTACGAATGCAGATATCTATCGTGTTTTAAACAACATGTTATGGGTCCTCGCAAACTACAGAA |
| | | ACCAAACCGTTCATTATTTGATAAGCGACATTAAGTTTGAAGATGGCTCCGATTTTCTGAACTATAATGAGCAAC |
| | | CGTTGTCGCGTATGCTTAATAATTATTTTACCATCGCCCTGCGCGATACTGCGAACAAGTATTCTTATTCTCCCGA |
| | | AGCTTTAAGCTTTATTCAGTCTTCTCGCTATAAGACCGAGAATCGCCGGAAAATCCTGGACACTGACTTTTTCCT |
| | | TAGTATCCAGCACAACAATAGTGATACAAATCCAAAAAATCTGCATCTGTCCGGCGTCGGTGTTGCTCTCTTGAT |
| | | CTGTCTTTTCTTAGAGAAGAAGTACGTTAATGTGTTTCTGCAGAAATTGCCCATCTATGGACCATATAAGAAACA |
| | | ATCTATGGAAGCTAACATTATTCGACAGTCTTTTAGCATCCATACCGTGAAACTTCCGAAAGAACGAATTGTTTC |
| | | GGAGAAATCAGATTTTACCATTGCTTTGGATATGCTGAACGAACTGAAACGGTGCCCGAAACAGCTGTTTTCGA |
| | | CGCTGTCGTATGCAGATCAGAATGCCTTTCGCATTGTGTCCTCAGATATGTCTGATGTGTTACAGGTGCGCCATA |
| | | CTGATCGCTTCGCCCAGTTATCTCTGGAATATATTGACCGACGGGAGCTGTTCAGCGATATCCGTTTTCACCTTA |
| | | ATATGGGTAAACTTCGATATCTTAAAACAGCGGATAAACATTGCATTGATGGTGTTAGCCGGGTGCGCGTTCTC |
| | | GAAGGTAAAATCAACGCGTTTGGTCGGATACATGAATTTGAAGCCCGTCGAAAAGAACAGGGATTCGTTGAATG |
| | | GCATGAACAGGCAGCGCGACTGATCAAGACTAACAAAAATATCGAGATCAGAGACTTTGAGCATGTAAAGCGA |
| | | GACGACGCAACTCCGGACAGCTATCCATACATCATTGACACGTACACCCATTATTTGTTGGAGAACAACAAGAT |
| | | AGAGATGCGTTTTGGCGATTACTTGCCAAAACTTGTTAAAGTGGACGATCAGAAATGGACGGTCTATAACGAAA |
| | | TGCCGACGTGCTGTATGTCGGCCTTAGAGCTTCCGGCGATGATGTTTCACATGATGTTATGTGGGTCCGAGGCTA |
| | | CAGAACATCTGATAAAGGCCGAAGTAGAGAAATATAAGAAACTCTTCGGTGCAATGGCAAATGGTACACTGAG |
| | | TAAAGAGAACATAGGTAATTTTGAGATTGCGATGGAAGATCTTCCGAAAAAAGTTATTGATTGCGTTAACCGCA |
| | | AGAAATCCGGAAAAAGTTTTGTCAAACAGATTAAAAAGGAGATTGCTGAGATGCTGGCCGATACTAATTTGCGT |
| | | ATTGTACGTCTGAAAAGTGACAAACGTAGCGTTGCTTCGACCCAAAATAAAATGGGGAAACGCGGGTTCAGAA |
| | | GCATTCAGCCTGGCAAACTTGCGGACTGGTTGGCGGCAGATATAGTCAAACATCAGCCAAGTTTATTCTCAGGC |
| | | GATGATTATGGCACCGATCGCATTACAGGGATGAACTATCGGGTGATGCAGTCAACTATTGCCACGTTTAATGC |
| | | GGCAACACCCGAACATTCGCTGGATGAACTCAAACGCGTTTTCAGCGCCGCACAATTAATACAGTGTCAGGAAC |
| | | GGGAACATCCATTTTTACAGAAGGCACTGAACCGTAACCCGCAGAATACAATCGATTTCTATGAATTTTATCTCC |
| | | AGGCGAAACGTGCCTACTACCAATCACTCCGCCAATCCATAGAGAATGGGGAAGATGTAAAACTGCCGTATCTT |
| | | AATCCGGATAGAAATAAGTGGGTCCGCCGTGGCGCCTCATTTTATTCTACCATGGGTGATATCTATCTGGAAGAC |
| | | ATGCCGATAGAGTTACCCCGTCAAATGTTCGACAAAGAAATTAAAAAAGCGCTGGCGCAACTCCCTTCAATGAA |
| | | GGGCGTGGACATGAAACAGTCTAATGTCACCTTCTTAATCGCAGAGTATCTTAAACGCGAACTCAAGGATGATT |
| | | TTCAGCCTTTCTACCAGTGGAATCGCAATTATCGGTTCACGGATATGATGATTTGTGAAGAGAATTGTGATACTA |
| | | AAGCATTGGCAAGCAAGTTTATTCCGCTCGAACTGCGTGAGGAGATTTGGGAAAAACGCGGTGAGCTTAAAGAC |
| | | GCATATAAACGTTGGGCTTTTGGAAGACTGAACAAAAATCCTGACATCAAACGTTTATCACCGGCGGAAAAAGA |
| | | TGAACTGCTGGAAAAGAGAATAGCGAAGTGCAGAAATGAATACCAGAAAAGTGAAAAAATCATTAGACGGTAC |
| | | AAAGTGCAAGACGTATTGATGTTCATGATGGTAAAAAGTATGTTTGCACAAGGAGTCTTTACTGCGGAATCTAA |
| | | AGAGTTTGCTCTGTCCACTATCACCCCGGATGCCGAACGTGGCATTTTAAGCGAAGTAGTTCCCATTGATTTCAA |
| | | GTTTAGTATCGACGGTAAGACGTATACGATTCACAGCAATGGCATGAAGATAAAAAACTACGGAGATTTTTACA |
| | | AGCTGATCAACGATAAGCGCATGAAGTCGCTCCTGAACATCGTAACACACTCTACCATTGAAAAAGACCTGTTG |
| | | GAGAAAGAATTTTCCACCTATGATGATAAAAGACCAGAAGCCGTGGAAATAATATTTGAATTCGAAAAAGCAG |
| | | CCTACGAAAAACACCCGGAACTGAAGGAACTGTTAACACCTGAACGTAAGTTTGATTTTCGTGCCCTGTTAGAA |
| | | GAGTTACAGGCTAAAAGTGATCTTAGCCAAATTGATGCTCGGTATTTGTCACAGATTCGCAATGCATTCAACCAC |
| | | AATGCTTATCCTCGGAATCTGAAAATAACGAGTAATATACCTGAGATAGCTCAGGAAATGGTGAACATTTTTCG |
| | | TATTACCGATCCCTACAAAAAAGGTAAAAAATAA |
| 329 | JW13154 | ATGGAATCTTTAATTCAGCAAGAAGAGAATAAAGCTAGAAATCTGATCGATGATCCACAGTATTTCGGGGGCTA |
| | | TCTGAACATGGCTCGACATAACATATTCTCAATCAACAATCACCTGGCGAGCTATTTCGGAACCTCTGGTTTGTC |
| | | AAATGAAGAACAAATTCCGGATAGCTTCTTGCTGTCAGCAGATAAACGGCGGAATCAAGAAACTAAAGAACTG |
| | | ATTAAAGAAAACCTGTTGTTTGAAAGAACGCTGCGCTTTATGCCGATTTTTAGAATTTTTGATACAGAAAGACTG |
| | | CCAAAAGAAGTTCGTCTGAACACCGAAAATATGGAGAAAGATTTTGATGAGATGCGAAAGTGCTTAAAACAGG |
| | | TCTTTAGCGAATTGAACATTTTTCGAAATGACTACACACACTATTTTTCCACCAACACCGAGACAACTCGCAAAC |
| | | TGCAAGTGACGCCCGAACTGGAAGAATTTTTGTCTCGCAGTTTTAAGTTGGCGATTGCCTTTACTAAACAGCGTA |
| | | TGCGTGACGTTTTAAAGGAAGAGGATTATAGCTTAGTCGAAAAAAAAGTCATGGTCTTGCCCGAGGAACGCGTT |
| | | ATTACCACTGAAGGCATTGTCTTTCTTGCGTGCATGTTTCTGGAACGTGAGTATGCGTTTCAGTTCATAGGGAAA |
| | | GTTGTGGGTTTAAAAGGTACGCATCGAAATGAATTCATTGCAACCCGAGAAGTTCTCATGGCTTATTGTGTGAA |
| | | ACTGCCTCATGACAAGTTTATAAGCGAAGATAGTAAACAGGCCCTGATATTAGACATCGCGAATGAGCTTAACA |
| | | AGTGTCCCTTGACATTATATGACGTGATTACTGAGGATGGTCGCAAACAATTCAGACCTGAATTAACGGACGAT |
| | | GCCAAGAAAAGTGTGATTGAAAATTGTATCAATGAGGACCTCGAGGTCGATTACGATGAATACATACAAATTCT |
| | | GACCAAAAAGGTACGCTATAAGAATCGCTTCCCATATTTTGCCTTCCAATACATAGAGGAAACGAAACTTCTGG |
| | | ATAACTTTCGCTTTTCCATTGACCTTGGCCAGTTTGTTCTGGCCGAATATGAAAAACGGATGGCGGGTGAACCAA |
| | | CCTCTCGTATTGTCGTAGAAAATGTAAAAGCTTTCAAGTATCTGAAAGAAGTGACAGATGAAGATGTAGTTCTG |
| | | GGACTCATGAAATCGAATCCGCCTAGCAATCGTTTTCTGCAGTTTTCACCTCACTACAATTCCGATAATAATAAA |
| | | ATTGGTATTAGTTCTAAACCACAGACAAGCGTAGTGAAAAGTAAAGGGAAAATAGACAGCAAAATCGAGTACA |
| | | AGATTAAACAGCCGTTACCGCGCGCATTTGTGTCTATACATGAATTACCGAAAATCATCTTGTTAGATTACCTCT |
| | | CCAAAGGGTCTGTTGTCAAGATCATTAACTCTTTCATCCGTACCAATAAAAGTATTATTCTGGATGTAGACAAGA |
| | | TCAAGGAGATCAAAGAAAAGCTCCCGAATAACGAGGTATGGTTTCCTTTTCGGCGGATGACCGATTCCAAAAAA |
| | | CACTCAGCCTACTCGGAGAAACAGAAAGCGGAAATTTTGCGCAGAAAAAAATTGCTGAACGAAATTCTGAGTTC |
| | | CTACTCGCTTAACATCAAGCAGATTCCCAGTAGAATTATCGATTATTGGCTGAACATTATTGATGTGCGCAAAGA |
| | | ACGTTCGTTTTCTGATCGTATCAAACTGATGAAACGGGATTGTGCCGATCGGTATAAAGCCGTGAAACGAAATG |
| | | AAAAAGATAAAACAGTGGCGATCCCTAAAATCGGAGAAATGGCAACGTTTTTGGCAAAAGATATCGTAGCTAT |
| | | GATCGTAGACGAAGACAAGAAATCTAAGATAACGTCTTTCTACTACGACAAAATGCAGGAGTGCTTAGCACTGT |
| | | ATGCGAATATAGAAAAGAAAAACCTTTTTATTCACCTGGTTACAAATGAACTCAAGCTGAACGAAAAGGGCGG |
| | | ACATCCCTTTTTAAAACGTATTAACCTTAACAGTATAACCAGAACGAAAGAGCTCTATGAAATCTATCTTAGCGA |
| | | GAAGGCATACAAACTTAATTCCAAGGAAAATGATGAAAGCTGGATGAGTATGACTTTTTACCATCTTGAATGGA |
| | | ATGAAAAAGCAAAGAAGAAGATGACCAAGGTTGTCTATCCCGTGAATGACGAACAGATCCCATATACTATTAA |
| | | ACAGTGGAACAAACCGCAACAGCCTCTGTTTGACCGCTTTACGAATGAACAAGGAAAAAGTTCAGACTGGGTTC |
| | | GCCTGAAACCGCTGGATCTTCCGACTAATCTTTTCGATGAGGAGATTTGTGTTCAGCTGCGGTCCCGGCTTCAAG |
| | | AGGCAAAGATACCGTTCGACAACATCTCAAATTACTCAGAATTATTAAAACTTTGGTGGAAATCCCGCGATGAT |
| | | AGCACTCAGCCTTTTTATCTCCTCGAGCGCCAGTACAACATCTATGACGAGTCAGTCCGTTTTACATTGAACTCG |
| | | AAAAATAAGTTCAAAGACTATTATCAGGCCGCGCTGAAAAAAGTATTCAATCAGAAAAAAGCTGAACGTGAAG |
| | | CCAAACGTCGTTTTAATAAACGGCTGCCAGATATTCAGTTCAAAGATGTTGAACGTGTTTTCAAACATGCAATAG |
| | | CAGAAACTGAGAAGCAAATTAGAATTATACAAGAAGAGGATCGCATCATGTTACTGATGCTCGAGAAACTCAT |
| | | GGACGATCAACAGCTGAAACTGGGCAAAGCTGAGACACTCTTATCTTCAACCGTACCGGTTAAACAGAAGATTG |
| | | GTGATAAAACAAATTCGTCACGTGTGATCGTTGCTCAACGTAAACAAAAACATTATACGGTGTTACGTAAGTAT |
| | | CAGTATGATCGTCGCCTGCCAGAGTTATTCAAATATACCACCGAGAAAGAAGAGTTGAAGCTTGAGTGGCTGGA |
| | | AGACGAGCTTAAGGCCTACAACAAAGGCAAGCTCAAAGTTTTCGATCTTGTGTTTAGCTTAGAAAAACGTATCA |
| | | TAGAGGTTGCGAAACAGGACATTATAGCATTGTTGGATAAAAGTGGTTCTAACGATTCCAAGTTTAATGTGGAT |
| | | CACAAACCGTATATCAAATGGCTGGAAAATATGGAACTGATTAACAGCAAAGAAGCCGGCTTTATGAAAAAGA |
| | | TTCGTAACTCATTTTCGCATAATCAGTTCCCTGAATGCCAGACTGTCGAGCTGATGATTTCGCTGAAATCAGACA |
| | | TCCCGATAGCTACACAGATTGTGAATGAGTATGAGCGTTTAATATTACGTATTAGCAGTCAAATAGAAAAGATG |
| | | AAATAA |
| 330 | JW13155 | ATGGAGAAAGAATTGATTGTGAATGAGAACCGTGAACGTACATTAAAAGATGATCCTCAATATTTCGGGGGCTA |
| | | TCTTAATATGGCACGTCTCAACATCTTTAATATCTCAAACCACATAGCTAAGAGATTCGGTTTCACGATCTTACC |
| | | AAACGAGGAGAGAATCAGCTCTTCGTTTCTGTGTAATAAGGCACTGAAAAACGCGGATTGGAATCATATTCATA |
| | | GTAGAACAAAGCGCTTTCTTCCAATCATAAAAGTTTTTGATGCGGAGAGCTTGCCAAAGACTGAATATGATTTTC |
| | | TGATGTGGGAAGGAAAGAACTTCGCCTTAATGACCGATACCTTAAAATCAGTATTTTCGGAGATTCAGGAATTT |
| | | CGCAATGATTACTCTCACTTCTACTCTACCGAAAAAGGGACGATAAGAAAAACCAAAATCTCTCCTCAATTGGC |
| | | TTCATTTTTAGAAGTGAATTTCAAACGGGCCATTGAGTATTCTAAAATCCGCCTCAAAGACGTTTTACGAGAGGA |
| | | AGATTTTAACCTTGTAGAACGATTAAAGGTGTGCAATAACGGTAGCGAAATAACTACCGAGGGACTGGTTTTCC |
| | | TGATATGCATGTTTCTCGAGCGTGAACACGCTTTTCAATTCATAGGAAAAGTGAAAGGTTTAAAAGGCACGCAA |
| | | TATCCTTCCTTTATAGCAACTCGTGAAACGCTGATGAGCTTTTGTGTCAAACTTCCCCATGATAAGTTTGTCTCCG |
| | | AAGATCCTAAGCAGTCCCTGATTTTAGACATAGTGAACGAGTTAAACAGATGTCCAAAAACCTTATATGAAATT |
| | | ATTAGCGAAGAAGATCGGAAACAGTTCCGTCCGGAGCTCGATATAAAGAGTGTAGACAATCTCTTAAAAAACTC |
| | | TGGTAAGGAAGAGCTGCTGGATACGATGGAGTTTGAAGAATATATGGAATCATTGACCAAACGAGTCCGTCATT |
| | | CAAACCGCTTTCCGTATTTTGCATTACGCTTCATTGAAGAGATGAAACTCCTGAACAATATGCAGCTCCATATCC |
| | | ATCTTGGAAAGTTTGAACTGCAGAAGTATGACAAACAGTTGAACAATGAACCTTTTGAACGTGCTATTATTGAG |
| | | GATGCCAAAGCATTCGGTTATTTGAAAGACTTCAATGATGAAAATGACATTAAGGGCGAAATTGTAAGCGGAAA |
| | | AGATTCTGAGGGTTTCGCACAATTTTCTCCGAGCTACTTTCTGAAATACAACAAGATCGGGATTCGTTATAAGCG |
| | | TGACATACCCCATCTGATAGTTGACAAAAATAACAGCAAGGGTGCATACAATTTGAAACAACCTCTGGCGAAGG |
| | | CCTTTCTTAGTGCCTATGAGCTGCCAAAAATTATTCTCATGGAGTATCTTCAAAAAGGCCGCGCTGGCGAACTTA |
| | | TTGATGATTTTATCCAGCTTAACGACAATAAAATTATGACGTGGGATTTCATAGAGAATATCAAAAGTCAGTTGC |
| | | CGGATTGGAAAACTTTCAATAAGAAGTCGTTTGGACTGAAAGACAAAAAAGGGTATCAGACAGAAGAACTGAA |
| | | AGAGCTGAACACCCGTAAAAATCAGCTGAACAAACTCTTAGCGCCAGAGGGATTAAACCATAATCGTATTCCCG |
| | | AACGGATTACAGATTATTGGTTGAACATAGGCGACGTGAAAAAAAAGCGCTCGTTTTCTGATCACATTAAACTT |
| | | ATGAAACGGGAAGGTATGGAGCGCCTGAAACAGCTGGAAAAGTTCAAAAAAGAAGGTAAGGGTAAAATACCA |
| | | AAAGTAGGCGAAATGGCCACGTTCCTGGCAAGCGATATTGTCAATATGGTGATTAATGAGGAACGGAAAAACA |
| | | AAATAACGAGTTTTTACTACGATAAAATGCAACAGTGCCTCGCGTTATACGCCGATTCAGAAAAAAAGGCCTTG |
| | | TTCATTCAGATCATAAAGGAACTGAAGTTAAACGAAGAAGGCGGCCACCCGTTCCTGAAGAAGATTGACCTGCA |
| | | GAAAATCAGTAAAACGTCCCAGTTGTATGAACTGTACCTTACGGAAAAAGTTAATAAACCTATTCGTGAGGAAG |
| | | TTTTTAAGTATGATCGTAAAAAGGGCTATAAGGTCACCAAAATCATCTTACGAGATAAAAGTTGGATGGGGGAA |
| | | ATGTTTTACACTACTGAAAAATCCGAAAAGACTGGCAAAGATATTACCATCGTCCGTATGCCGGAAAATAAAAC |
| | | AGAAATTCCGTTTACAATCCGCCGTTGGGAAGAGAAACAGAAAACAGATCTGAAAGTTTGGTTTCATAATGTGA |
| | | CCAAGGGTAAAGACAAAACTAAAGACGGTCCCAAAGCGATTTCGTTACCGACGGATATTTTTGATGACGAGATT |
| | | TGCACCCTGATTAAGATTCAGTTGGACAAAATCAATGTCAAGTACAAAGAGAATCTTAAGTATAATGAGTTGCT |
| | | GAAATTGTGGTGGTGGAAATCTCGGGAAGACGACGTTCAAAATTTCTATCATAGCAAACGCCTGTACAAGGTTT |
| | | ACGATGAAGAGATTAATTTCACCCCGGATACAAAAAGTACATTTGTGGAATATTACGAAAAAGCACTGAACTCC |
| | | GCTTTCGAAAAACTGTCAAAAGCGCGTAAAAAAGAACGCAAAACGCACCGTGCCTTGCCCGATATCAATAAAA |
| | | AGGAAGTAGAGAAAGTGTTTAAACGGGCGATAGGGGAGACAGAGAAAGATATCCGCATCCTGCAGGAAGAAG |
| | | ATAGAATTTCCATTTTAATGCTGGAGATGTTGATGGATAATGCCACCCTCAAACTGAAAAATATCAGCTACTTGC |
| | | TTAACGACACTACCAGAATTCAGCAATCGATTACCGCGCATCTGTCATTTGATGAAAATGGCGAAAGTATTAAA |
| | | GAAGGGACTAAACCGACGATTACCAAAACAATTATCGCCGATCGGAAACAAAAAAACTATACTGTTCTGCGGA |
| | | AGTTTATATTTGACCGAAGAATGCCTGAGCTGTTTGAATATTATGCTTCAAATGAAGTAGCTTTAGATTGGGTTA |
| | | CAGACGAACTGCGCGCTTATAATACCGCGAAACAGTATGTATTTGACAATGTTTTCAATCTTGAGCAAAAACTT |
| | | ATCGAGAAAGATGAAACAGGGATCAAAGCAATGTATACTAATAAGGAAGGTACCCCGATAACCGGAAATATTC |
| | | AGTATAAACCGTACGTGCGCTGGCTCGAAAATAAAGGTCTGATCAACAAAAACCAAAAACGCTTTCTGACAATG |
| | | ACGCGAAATTGTTTTGCGCACAACCAGTTTCCGCAGAAAAAGACTGTTTTACGTATTGTGCCAAACCTTACAGAT |
| | | AATAACATCGCCCTGCAGATTGCAGATGCATATAAGAATATCACAGACGAAATCCTTACTAAACTGTAA |
| 331 | JW13156 | ATGGATGCAGAAGGAAAAAATGAACGCACTCTCCAGGACGATCCACAATATTTCGGCGGTTATCTGAATATGGC |
| | | GCGTCTTAACATTTTTAATATCAGCAATCATGTCGCCGATAAACTTAGCATCGCATTGCTGAAGAATGAAGAGG |
| | | ATATCAACAACTCCTTCCTGTGTAACTCTAATCAGAAACTCAACTGGTCAAAAGCTTATGCGATGACTATGCGCT |
| | | TTATGCCGCTGCTCAAAGTTTTTGATACCGAACGCTTACCTGAACATCGTACCAGCCAAAAAGATAAAGAAAAA |
| | | GGTAAAGAGTTTGGAATTATGTGTGATTCACTCCGCATAGTGTTTCGTGAGCTGAACCAGTTTCGGAACGATTAT |
| | | TCTCACTATACAAGCACTGAAGACAATTTTACACGCAAAATTGAGATATCCCCGGAATTAGCCGAGTTTCTGAC |
| | | ATGTAACTTTAAGCGTGCAATTGAATACACAAAACAGCGATTTGCGGACACCTATCAGAATGAAGATTTTATTTT |
| | | AGCTGAGCGGATGCAAATGGTGAAAAGCAATATTATTACGACTGAGGGGATTGTGTTTCTGACATCACTCTTTCT |
| | | GGAGCGGGAACATGCGTTTCTGTTCATCGGTAAAGTAAAAGGTTTAAAAGGGACACAGTATAAACAGTTCAAA |
| | | GCTACTCGAGAGGTGTTTATGTCTTATTGTGTCAACTTGCCGCAAGATAAACTTATATCAGATGATTACACTCAA |
| | | TCACTTACCATGGACATCATTAATGAATTGACGAAGTGCCCAGAGACTTTATACAATGTGTTGGATGAATCCGCC |
| | | CGTAAACAATTCATACCGCAGCTGGGCGAAGTCGAAACGGATAATGTGCGCCAGAATTCCATTAATGAAGCTGA |
| | | ACTCACGGATGAGAATGATTATGCACAGTATATGGAAGACATTACCAAAAGAGTACGGCACTCGAATAGATTTC |
| | | CGTATTTCGCATTACGTTTTATTGATGAACTCGATTTGCTGGGCAAGTTCAAGTTTCAGTTGGACCTTGGCAAAC |
| | | TGAAACTGAACACGTATCCCAAACCATATATGGGGGAAGATGTAGATCGTGCTATCACAGAAAACGTTTCTGCG |
| | | TTTGGGAAACTGAGCGATCACCAGGTTAAAGAAGAAGTACAGGCGAAGGTTGTGAAAGATTATTCTTCTGTACA |
| | | ATTTGATCAATTCGCTCCGCATTATAATATGGAATGCAACAAAATTGGAATTAGTCGTAAAAGTGAGACAGCGA |
| | | TTGTTATTAAACCCTCTGAAACCGGTGTGAAAAGTGCCTATAAACTGAAACAGCCGATTCCTGAAGCGTTCTTGA |
| | | GTATCAAAGAATTAAGTAAGATAGTGCTGTTAGAATACCTGAGTCCCGGTGAATCACAACGCTTCATTACCGAC |
| | | TTTATTTGTACGAATAGCGATAAGCTGATGAATCTGGATTTCATCAAAGAAGTAAAAGGCAAACTGCCTGTCTTC |
| | | GACAAACCTTTTTACAAAAAGGTTACGATCAAACGTAAAAGTTACACAAAACACGAACTGACTGATCTTGAGGC |
| | | CCGTAAAAACCTTTTGGATCAGGTTTTAGTTACCTATGGGTTAAACACGAAACAGATTCCAACCCGCATTACAG |
| | | AGTATTGGTTAAACATTCGTGATGTGCGCAATCAGTATATTATTTCAGAACGTATAAAGAGTATGCGAAAGGAT |
| | | TGCACGACCAGATTGAAAAGCCTGAAAAAATTGGATGAGACCGGTAAGGGTAAAGTTCCAAAAATCGGCGAAA |
| | | TGGCATCATTTTTAGCAAGAGACATTGTTTCACTGGTTATTGACCCGGTCAAAAAAAAGAAGATCACCTCTTTTT |
| | | ATTACGACAAACTTCAGGCCTCGTTAGCCTTGTTTGCTGATCCCGACAAGAAAAAGGAGTTCATGCACCTCGTTA |
| | | AAGATGAATTAAACCTGCTTTCGGTCGGGGGACATCCCTTTCTTATCAATATCGACTTTACCACGATACACTACA |
| | | CAAGAGATCTTTATAAGAAATATTTGGAAGAGAAAGGTTGCAAAATCACGAATGATCGGAAAGATATAAGTTG |
| | | GATATTCAACACTTTCTACAAGAAAGAACCGGGTAAAAATTCCTCACTGCCTGTTACCAAAGTTAAACTTCCGCT |
| | | GGATAAAAATGGTAACCCTGACTCCAAACGGCTGCCGCATTCTCTTTATTCGCTGGGCAACCGTAAAACAGATA |
| | | ACTCCATTGAAGAAATAGAAAAGTGGTTGTCCAATGTTAAACATGGAAAGATGAAAACTGATTGTACCAAACCA |
| | | GTAGACCTGCCTACGAATCTTTTCGATTCTAGATTAATTGAGTTACTGCAGAAAGAGACCGGCGACACCAGCCT |
| | | GGCACCAAAACTGAATGGATTATTTGTTACGTGGTGGAAGAAACGTGGGGACTCAACACAATCGTTTTACAACG |
| | | ATAAACGCAACTACGTAATCTATGACCAAGAGGTGTGCTTTCTTCCAAATACCAAGAAACTGTACCAAGATTAT |
| | | TATCAGAGCGCCCTTGATCGCGCTTTTCGTTTAAAAAGAGAAGAACGTCGGCAGGAGAGATTACTCAATATTCG |
| | | CTTACCGGATATACAGCTTAAGGATATGAAAAAGATCTTCAATATAACGCTGAGCGAAACTGAAAAGGAAATC |
| | | AGAATTTTACAGGAAGAGGATCGTCTGCTGTTGCTCATCCTGGAGAAGTTAATGGAGAAGGAAATAGCAGGCAC |
| | | ACTCAACTTGAAGAATGTCAATGATCTGTTAAACGAACAGGTGGATATCTGCCAGCAGGTCAAAACTTATCTTA |
| | | GTTTCAAAGAAAACGGTGAACTGGCATCGAAGGACGAACGCATGCAAATAACTAAAAATATAATATCCTACGG |
| | | TTCTCGTAAAAACTACGGCCTGCTGCGACGATATGTCCATGACCGTCGCATGCCTGAGTTATTTGAATATTATCC |
| | | TACCGACGATATCCCGTTTGAGGCGATTAAACAGGAATTAGAGGCCTACAATAAGGCCAAACAAATCGTATTTG |
| | | ATAAAGTCTTTGAACTGGAACGGGCGCTGACTGAGCGATTCAAAGACGAAGTTATGGCACATTTTGTGAACCGG |
| | | GACGGCGGAAGCCGCTTGAAAGGTAATATTCAGCATAGTCCGTATCTGAATTTGCTCGAGTCGAAAGGCATTAT |
| | | CAGTAAAGACGCACATCGTTTTCTGAAGGCTGTACGCAATGCGTTCTCACATAATCAATACCCCCACAAGAAAA |
| | | CAATGGAGATTTTTGTGAAGGAATGGAATACAAGCAACTTCGCCAATCAGATTGTGGACATCTACAAGCAAAAG |
| | | ATCGACGAGGTGATTGACAATATTAAGAAATAA |
| 332 | JW13157 | ATGGAAGAAGCTAATCGTTATATCTATGGTGCATACTTTAATATGGCGCGTGATAATTTCTTAAACACCATCAAA |
| | | CTTTTAGCTGATAAAATGAAACTCGGGGCCACATCTGGGTTCGGCAAAGACGGGAATGAGGTTAATGATATCAA |
| | | CGAACTGTTCGGTGATAAAAATACTTATGCGAACATTGAAAACGTCGTCGAATTTTATTTTCCGTGGATCAAAGC |
| | | ACTCGAGGGACGATTCAGTCTGGATAAAGGTGATAGAAATCTCAACGATATGAAAATGTTCTACAAATCCGTTC |
| | | TGACGGCATTTTTTACCGCGGTTGACTCATTGCGTAATAAGTACACACATTATAGTCACAAAGACCTTAACATCA |
| | | GAGAGATTAAGATAGAGTGTACGTTAGGCGGTAAGGATTATTGTATTGGACTGCTCAACGCTCTGGACTGCATC |
| | | TACGATAGTGCCGTCAATCTTTTAAAACTGCGCTTTATGGCAGATGAAGATGAAGTCGCCCATCTTCGTCGCTGC |
| | | AAAGCGGTTAATAAAAAAGTGGTAGTTCGGACAGAGAAAGATGGTTTTTATTATCGTCTGTCTGATAATGGCGA |
| | | AGTCACAGAAAAAGGTGTCATTTTTATTGCATCCATGTTTCTGAACCGAAAGTACGGGTTCTTGTTTCTCAAGCA |
| | | ACTGGAAGGCTTCAAAAGATCAGACGAAAAGAGATATCGGTTAACCTTAGAAGCATTTTTGGCCTTTAGCAATA |
| | | TTAAACCAGTTGATCGCCTGAAATCAGACAAACTGGACCGGGCGAGCCTGGGTTTAGATATGTTAAACGAACTG |
| | | ACCAAAATTCCCAAAGAACTGTCCGAGACATTATCAGTAGACTGCTTATACAAGTATCTTGCTTCAGATGGGGA |
| | | AGATGATCTGCGTAGCCGTATTCGCTATCAAGATAGATTTGTTCCCTTAGCATTGGAGTTCATATCGCAATCCGA |
| | | CGAATTCAAGGATTTCCGTTTCTACACGTACGTTGGCAATTATGTTTATAAAGGCTACATTAAGCGTCTGATCGA |
| | | TGGTACTGATAAAGAGCGTTACCTTTCAGATCGACTGTGTGGTTTTTACAAATCGGTGAATGATGCAAGCTCTGA |
| | | CGCAATTGCCCAGAAATATGGCGTGGAAATTAAAGATAGTAACGAACCGGACTACATGTTACCGGATAGCTTTC |
| | | GGCCTCATGTATTACGTGCTACGCCGCATTTCGTCATTAACAACAACAATATTGGCATCAAGATATGCGGCAAC |
| | | GACTGCCTGCCAGTCGTCAATGGAAAAGGTGTAGAATCTCCTGAACCTGATTATTGGCTGTCGATCTATGAGTTA |
| | | CCAGCCATGTTATTTTACGCTTATCTGCGGGAGAAAAACGGTAAACTGCTCAAAGACTATAAGTCAATTCGTGA |
| | | GTTAATCGAGGATGTGGAAAAAAAAGCGGACGAAAAAAATGATCGTGATAAAGGTGCACTGATGGCGCGTCAT |
| | | ATTGATAAAGAGATCATTTGGACTCAGACTAAACTTGATGAAGTTAAACGCTTAGAAGAAAAAAAAGTGGCGG |
| | | CCTATGGAAAAAAAGGTCGCGTTGTGTTAAAAAGTGGGCGCATGGCCGATCTGTTGGCCCATGATATGGTTCGG |
| | | TTGCAGCCTGCCACCAAAGGAAGTGATAAAATAACTGGCGCTAATTTTCAAGCACTCCAGGTGTCCCTGGCGTA |
| | | TTTTAAACGAGATATACTGGCCGATGTTTTTTCTCGCGCTATGTTGACCACAGGCAATCATCGCCATCCCTTTCTT |
| | | TATCGTATCGATGTGTCGCACTGTAGCTCTCTTAGAGATTTTTATGTGGCGTATCTGGGTGAGAGACGTAAGTAT |
| | | TTTGAGGACGTCGCCAAGAAAATTACCAAAAACAAACTGAACACCCCGTGCCATATCTTGCGGCGCTTGCAGCG |
| | | AGAAGGTTCAGGCGAGGAAGCCGGGAAAGACGTTAAACCGAAGTTTCTGCCACGCGGCATCTTTACGGGATCC |
| | | ATAAAGAGTTGTCTTGAGAAATCGGCTCTGAACATTAATATACGTAATGCACGGAATGATGTTAAACCTGCGAT |
| | | TAATGCGGCTTATCTCATATTCATGTATTACAAAGAGATCGAAAAGGGTGAGTTTCAGGGTTTCTATGGCGAGA |
| | | AAAGACGCTATGATATACTGGAAGAAGGGAAACCGTTGGATCTTGATGAACGGAAAAAAGCACTGGCATCTAT |
| | | CAAACCCGCTAAAATCGATGTGAGCGAGGCTAATATGCCGATGAGCAAAGAAGAACACCTGATGCGCAAACGT |
| | | TACCACGCTGTATGCAATAATGAAAGCGCAATCCGCATGTATCAGGTACAGGATATACTGTTGTTACTCATGGC |
| | | GAAGGATATCTTCAAGAAGGCGCTGTCAGAGGTGGTGATGTCTAAGAAAATTGGACTGGAAAATCTTAATGGCA |
| | | TTTTCGACGCGCCAGTTAACTTCGTTAAAAACTTTGACAACATTAAACTGACTGCAACTGGCATTAAAATTAAAG |
| | | ATTATGGAAAGGTATGCCGTCTCGGAACAGACTTTAAGTTCAATAGCCTGATAAAGGCCTTCCATAAAGTATAC |
| | | AGTAAGAGTGTCGAAATGGACTATTCTGACTATCTCAAAGAAGAAGAAGAATTTGAAAAATACCGTTTGAACAT |
| | | GGTGAAACTTTGTCGCGAGGTGGAACGGGGTATTACGGAAGATTTGCACCTGTCTCTGGATGGAAAGAGTCATC |
| | | TTTCATTCAATGACGACGTGATTAAGTCGTATAATGACAAGTACAATGTGTTTAACGGGGACGACCTTACGTTTT |
| | | TTATTAATGCCCGGAATATGTTTATGCACGGCGACTATAAGTATGAGTGTGTTAAGTATGTAGTATCCGAGCATT |
| | | TTAAGGGATCCTTAAACGATGTAAGCTTTGCCAAAGAAACATACGGTCACTTTTGTAATCTTTTGGAAAGCATGC |
| | | GCAAAAAAACCGGGTTGCGAATAGATATTTAA |
| 333 | JW13158 | ATGACTGAGACCAAAAGTAAACGTGAAGATATTGCAAAACCGCCTGCCGCAAAAAGTCGCTCCAAAGCTGCTG |
| | | GCTTAAAATCCACTTTCGCTGTCAATGGATCCGTGCTCTTGACTTCTTTCGGGCGAGGAAATGATGCGGTACCAG |
| | | AAAAATTAATTACCGAAAAAGCAGTTAGCGAGTTGAACACAGTCAAACCACGCTTTTCAGTGGAAAAACCTGCA |
| | | ACCAGCTATTCAAGTAGTTTTGGCATAAAAAGTCATATATCCGCAACCGCGGATAATCCCTTAGCCGGTCGGGC |
| | | GCCAGTGGGCGAAGATGCGATACGTGCAAAAGAAGTGCTGGAGCAAAGAGTATTTGGCAAAACTTTTCCTGAT |
| | | GATAATATCCACATTCAGCTGATCTACAACATCCTCGATATCCGGAAAATCCTGTCCACTTACGCCAATAATGTT |
| | | GTGTTCACGATAAACAGCATGCGTCGTTTAGATGAATATGATAGAGAACAGGATTATCTTGGCTATCTTTATACG |
| | | GGTAACTCGTATGAACGCCTTCTGGATATTGCTGACAAATATGCAGTAGACGGCGAGGATTGGCGTAACACGGC |
| | | GGCCGGGATAAGTAACGACTTTGAAAAAAAACAGTTCCAGACGATTAATGGTTTCTGGGATCTTCTGGACATGA |
| | | TAGAACCATACATCTGTTATTTTTCAGAGGCTTTCTTCTGTGAAACAACAGTTAAGAATCCAGATTCTGGTCGCA |
| | | TCGTGCCGTGCCTGGAACAGCGAAGCGATGGTGATATCTACAATATCCTGCGCATTCTCTCAATTGTGCGCCAAA |
| | | CTTGCATGCATGATAATGCTAGCATGCGGACCGTCATGTTTACCTTAGGTCAAAATTCTGTACGGGACAGAAAA |
| | | AATGGATTTGACGAATTAGCAGAATTACTGGACTACCTGTATGATGAGAAGATCGACATCGTTAATCGCGACTT |
| | | TCTCCGCAATCAAAAGAATAATATTGAATTGCTCAGCCGTATCTATGGCTCTTCGGCGGATAGTCCGGAACGGG |
| | | ACCGACTGGTACAGAACTTCTACGACTTTCGAGTGCTGTCGCAGGATAAGAATCTGGGTTTTTCTATTAAAAAGT |
| | | TACGTGAGAAGTTGTTGGATAGCCCTGCATTATCGGTAGTACGTTCTAAAAAATACGACACAATGAGATCAAAG |
| | | ATCTATTCCTTAATTGACTTTATGATCTACAGAAAGTTCTCGGAAAATCACGTCGCGGTCGATGATTTCGTTGAA |
| | | GAATTGCGTAGTCTGCTGACAGAAGATGAGAAAGAATCTGCCTATTCTAGATGGGCGGAAACCCTGATTAATGA |
| | | TGGGTTTGCGCAGGAGATTTTGGTCAAACTGCTGCCACAAACAGACCCGGCAGTAATTGGAAAAATTAAGGGAA |
| | | AAAAACTGCTGAACGACTCAATCGCAGGAATTAAGCTCAAAAAGGACGCGAGTTTCTTTACGAAAATTATTAAT |
| | | GTACTCTGTATGTTCCAGGATGGGAAAGAAATCAACGAGTTAGTGAGCAGTCTCGTGAACAAGTTTGCCAATAT |
| | | CCAATCATTTGTGGACGTTATGCGCTCGCAGGGCATTGATTGTGGGTTTACCGCTGACTATGCCATGTTTGCAGA |
| | | AAGCGGCCGCATATCCCGCGAATTACATATACTTAAAGGCATAGCCCGCATGCAGCATTCAATAGCTGGCTTAG |
| | | GGGATGTTAAAATATATTCCTCTGATGATAAGTTTCATGGTGTGTCGCGTCGAGTCTATACCGATGCCGCATACA |
| | | TACTGGGCTTTGGTGAACGTTCAGAAGATAATGATGGTTATGTAGACGATTATGTTAGCAGCAAACTGCTGGGC |
| | | GGTGCGGATAAAAATTTGCGGAATTTTATCACGAACAACGTTATTAAAAACCGACGTTTCCTTTACACGGTGCG |
| | | GTATATGAATCCCAAACGGGCAAAAAAACTGGTCCAAAACGACGCCCTGGTTGTCCTCGCGTTGAGCGGCATTC |
| | | CGGAGACACAAATAGATCGCTATTATAAGTCCTGTATTGAGAAACGCAGCTTTAATCCGGATCTTAACGAGAAA |
| | | ATTGCGGCACTGAGTGAGATGATTACGACTTTAAAGATTGACGATTTTGAGGATGTGAAACAGAACCCGGAGAA |
| | | GAACGCAAATTATGAGGCGAAAAAAAATCAGAGAATTTCTAAGGAACGTTACAAAGCTTGCATCGGTTTGTACC |
| | | TGACCGTTCTTTATCTTATCTGCAAAAACCTTGTTAAGATCAACGCTCGGTATAGCATAGCTATTGGGTGCTTAG |
| | | AGCGTGATACTCAGTTGCATGGTGTTGACTTTAAAGGGGCGGCGTACATGACACGTGATGTCTTCATTGCCAAA |
| | | GGATGGATCAATCCGAAGAAACCCACAGTTAAGTCAATCAAAGAACAGTATGCCTTCTTAACACCGTATATTTT |
| | | TACCACGTATAGAAACATGATTGCCCACCTTGCCGCCGTGACCAATGCTTATAAGTATATTCCCCAAATGGACCG |
| | | GTTTAAAAGTTGGTTTCACCTGTATCACACTGTTATTCAGCATTCTCTGATTCAGCAGTATGAATACGACCGTGA |
| | | TTATGGACGTAAAGGGGCTCCGGTTGTGTCAGAACGCGTTTTACAATTGCTGGAACAGTGTCGAGAACATTCGA |
| | | ATTACTCTCGCGATCTGCTGCATATACTGAACTTACCTTTTGGTTATAACCTTCCTCGTTACCTGAACCTTTCATC |
| | | CGAGAAATACTTCGATGCCAATGCAATTTAA |
| 334 | JW13159 | ATGAACATTCCTACGATCATAGAGCAGAAAAAACAATTTTTTGGCACCTACTCTGTTATGGCGCTGCTGAACGTC |
| | | CAGACAGTGCTGGATCACATTCAGAAACTTGCAGACATAGAGGACATACCGTGCTATGACGAGAATGGGAAAG |
| | | AGAAAGATAAGCGCGAGAACCTTTGGGAGCATAGTGTAATGCTGTACATCAATTATAAGAACAATTCCATCCAG |
| | | AAGGCTCCCGAAAAGACCGCGTTAATCATTGATAAACTGATGGCATATTTTCCGTTTCTCAAAATCATGGCGGA |
| | | GAATCAGCGTACACATAAAAACAAGAAATATCAGCAGAATCGCCTCGAGGTGAACAGCGATGATGTGTTCGAT |
| | | GTACTCAACTGCTTATTTCGGGTGGTGAAAAAATATCGTGATACCACCACGCATTACATGCTGCACGACGAATG |
| | | TTGGGATGATAATAGCAAGTTTCTCCGTTGTTCGGAACAGATTTTAGCGACGATGTTGAACAAATACTACGACGT |
| | | TGCCTTACGTAATATGAAAGAACGCTATGGGTATACAACTGAAGAGCTGGCCTTCATCCAGAATCATCGCTATA |
| | | AGATAGAATGGGAACCAGATTCACGGAAACGTCCACAGTCCAATACGCGGTTTTTCTTTTCCCTCGTTGACAATA |
| | | ACGGCGATGCAAATCCCGACACGCTGCATCTTTCAGGTGTGGGAGTTGCCGTCCTCATTTGTCTTCTGCTGGACA |
| | | AACAGTACATTAATCTGTTCGCACAGCAGTTACCGGCGATCCAGAAATTTGAACCTCAGTCGGCCGCCCGGAAA |
| | | ATGCTGGTTCGGAGCATGGGTATTCACTCCATTGTCCTGCCAAAGGACCGTATTCATTCACAAAAAGATAATATG |
| | | TCGATTGCCATGGATATGATAAACGAAATGAAAAGATGCCCGAAAGAACTCTTTGACACGTTGTCTCCATCAGA |
| | | TCAGTCCCGGTTTCGAGTAACATCAAGCGATCATAATGAGGTACTGTTCCTCAGACACAATGATCGCTTTGCTCA |
| | | GTTGGCATTGCAATACATAGACTATTGCAAGTGGTTTAACGGGATTCGTTTCCATGTCAATATGGGTAAGCTGCG |
| | | TTATCTGTTTAATGCTGAAAAGAATTGCATAGACGGGATTAATAGAGTCAGAGTTATAGAACATGCCTTAAACG |
| | | GCTTCGGACGTATTGATGAGATGGAAGACCTGCGAAAAAGTGAAGTAGGTACTTTTGCAAATACTGGTGTTGCA |
| | | ATACGAGATTTTGAAAATGTTAAACGCGACGATGCTGATCCTAATAACTATCCGTACATCGTAGATACCTATAC |
| | | GCATTATATCCTGGAGAACAACAAGATAGAGATGCTTTTAACCGATACGAACAGTCTCCCCACAATTACCGAGA |
| | | AAGGCGGTAAGTGGTATGTGGGAAAAAAGGCGCCGACATGTCGAATGAGCATTTTTGAATTACCGGCCATGATG |
| | | TTTCACGCAATCTTATTGGGTAACCAAGCAACAGAAAAACGCATTAAAACTGTTTGTGCCAATTACTCGCGCTTA |
| | | TTCGAGGCATTGAAACAGGGTGCGGTTAATAAAGACAATATCGCCAGCTTTGGTATCGCGGAAGAAGATATTCC |
| | | GCAAAAAGTTTTAGATATCGTGAACGGTTGCGCTCAAGGAAAGGACGTCAATATCTTCATTAAAAAAAATATCG |
| | | ACGAAATGCTGCACGATACAGAACGTCGCCTGGAACGTTTACGTGAAGATCGCGAAGCTGTTAACGCAAATGAT |
| | | AACCGTATGGGTAAAAGAGGCTTTCGTCAAATACAACGTGGCAAACTTGCTTCTTTTCTGGCAGAAGATATCGT |
| | | CAAACTCCAGCCGACCCTGTGTAATGGAACAGATAAACTTACTGGCTTAAACTATCGTGTTCTGCAAGCATCTCT |
| | | GGCCGTTTATGATTCTGGTGGTATGAATGAGGCACGCCAGCAATTCAAAGCGTTATTTGTCAAAGCGCATCTGCT |
| | | GGGGACTGATCCTCACACTTGTCATCCTTTCCTGCATAAAGTGTTTGCTCGCTCTATCCCAGATAATACCATTGAT |
| | | TTCTATGAACGGTATCTTGCAGAACGTGAGAGCTATCTTAGCACCATTCAGAAAAAAGTAGCCATGGGTAAAGC |
| | | GGTGAATGTGCCGTTTATCAATCGTGCTCAGTCAAAGTGGTCTGCTCCAACGCAAGAAGCTTTAGGAAATGCTT |
| | | ATACAGATGATATGGCCATTGAACTGCCAAGACAAATGTTCGATGACGAGATTAAAGCGCACTTGAAAACACTG |
| | | CCGGAAATGGCGGACATAGATTTTGATAACGCAAACATTACGTTTCTGATTGGCGAGTACCAGAAACGGGTATT |
| | | GCATGATAATGTCCAGCATTTTTACTCTTGGCAACGAAACTACAGATATATTGACATGTTGAAATGTGAAACCG |
| | | ATCGAAAGAACTGTTTATGTAGTACGTACACCTCAGTAGAAGAACGTGAAGCGTTATGGGGCCGTCGTAAAGAA |
| | | TGCATTGAAAAATATCGCCAATGGTTTACGCGTAAAACTAGCAATGATCGCGGGCGATCCTTAATTAGTGCTGT |
| | | GGATATTGAAGAGATATTAGATAAACGGCTGAGTAATGCGCGGAACGAATATCAGAAGTGCGAAAAGACTATT |
| | | CGTCGCTTCAAAGTGCAGGACACCTTGCTTTTCATCTTAGCCAAGAAGGCCCTGACTAATTTTGCTGATTATAAT |
| | | GGAGAGCGGTTCTGCTTGAACGATATAACCCCTGAAGGTGATAAAGGGATTCTTTCACAGTTAATGCCTATGAT |
| | | TTTTCGCTTTGAAAAGAAAGGCAAGGTATACACAATTAAGAGTGAGTCGATGAAACCCAAAAATTATGGGGACT |
| | | TTTTCGTGATCGCGAACGACAATAGAATATGTAACTTACTGGACCTGATCGAAGATAACATAGTGTCCAAAGAG |
| | | GACATTGATAAAGAGCTGCAAAAATATGATCAGTGCCGCCCCGAAATGGCCAAACTTGTCCTGGATCTTGAAAA |
| | | ATGGACTTACTCTAAAAGTCCGGGCTTGATGTATAAAGAGAAAGTGCAGTTCAAAGATGTTTTGGACGAACTGT |
| | | GCAAGCACACCAATCTTACAGAGCGCCAGAAGTTCGTTTTAGGAAAAGTCAGAAATGCCTTTGAACATAATGAC |
| | | TATCCTGAGAAAGGCATTTTAGAAATCACTACCCTTCCACAAATCGCAGCTCGTATGAAGGACCTGTTTGATGA |
| | | ATATGCAGAGGTTGAATAA |
| 335 | JW13160 | ATGAAAGAGAAGATTAAAAACAAAAGTAGCATTATCCGTATTATTATGTCGAATTACGATGACAAAGGCTTAAA |
| | | AGAATTCAAGGTGCTGTATAACAAGCAGGGTGGTGTTGACACATTCACATGTAAAACTGATATTGTGGATGGAA |
| | | CAATTATTTTCTTAGAGATAGAAAAACACCTTCGTGACTTTGGCGATGATTTTTCCTGGGATATTTCATCTGATG |
| | | GAAAAAGTGTCGAAATAACCAAGCTGATAAACGGCAAAGAAACGCGTAAGTATAAAGTTTCTATCAAAAATTC |
| | | TTCGACGAAAGATAAAAAGAACCTGGTCGAATTAGAAGTTGAAGATCTCAAAGAGTCTGCAATTGATCGTCGCC |
| | | GAACCAAGAGTTCTACTAAACGGGTATTGTTGAGCAAAGACGTCATGGAACGTTATGCTGAAATTGCCTTTAGT |
| | | AAGAAAGAACGCTGGGAAGAGATCGATTCCCAGAAAATCTATAAAGTTAAACGCTTCTTAGATTATCGTTCAAA |
| | | TATGCTGATCTACTTCCAATTCATTAACGATTTCTTGACCAAAGGCATACCAGACGAGCTGGACAAAAATGGTG |
| | | AAATTAAACAGCTGGAACTCTGGAAACTGATTGACGACGATGAAACGATCTCAGATAAAAATCTGAATCAAGT |
| | | GTCCAAAAACTTGTATACATACATTTCACAGGAAATTAAAGATTCTCAGACGCGGGCCGAAAATAATCGGGAGA |
| | | AAAATAAAGAGAAGGAGCACTTTAAAGAGTTTTACGCTTTTAATGATATTAGCGAAGAATCAATTCGTGAGGAC |
| | | GTTAAAAAATTCATCTATCTTTATGCAAATTTGCGCCATAACCTGATGCATTACAATTACTCGTTTTTTGAAAACC |
| | | TTTTTGAAGGTAAGGACCTGGTAATAGAGAAAACGAAAAGTTTACTGTCGAGTACCTTAGATCTTAATATCTTCA |
| | | AAGAGTTATCCAACATAGTGGAATTAAGAGAGGAAAATAAAACTAATTATCTTGATGACGAAACCACCATTAG |
| | | AGTGCTGGGCAAAGAGAAAAAAGCAAAAACACTTCACAAAATCTATAGTATACTGTGTTCACGCAAGAACGGA |
| | | TTCAATAAGTTTATAAACTCCTTTTTTTCTACTGATGGTATTGAGGAAGAATTCTTGAAATCGGAAATTAAAAAA |
| | | GACTTTCTGGAACGCTTAAACTGGGTAGAGAAATCCCTGATTGAAAAAATCAATAATCCGCCAAGCGATACGAA |
| | | ACTGAAATATAAGAATGACAAAACTATTGAGAACATGACGAAAGAAAAAGAGGAGAAACTGGAATTAATTAGT |
| | | CTTTTGAACCCACAAGTGTCCGATTACAAAACCGAAAATTTCACCCCGTATTATTGGGACATACATCAGTCCCCT |
| | | AGTTATAAGAAATTGTATAATGATAGAAAAGTACTGGTTTCGGAATTGAGCAAACTTATTGCAATTGGAATTAA |
| | | TTCAGACACTAAGAAACGTATTACAGATCTCAATGCCGAACTTCTGAAGATAAAGATCAAGATGGAAAAAATTA |
| | | CCAAACTGAATTCGAAAATACGATTGCAATATAAACTTCAGATGGCCTTTGGCTTTATCTATGCGAATTACTCAA |
| | | AAGTGTACAAAGAAAAGCGAGTTCTGAACATTAACGGATTTGTTCAGAATTTCGATCCAACCAAACTTAATAAA |
| | | GAAAAAGAATTGGAGAGTCGCTTAATCTATCTTAAGGCTCCGTATAACATCTTTGAAGACAATAAAAGCCTTGA |
| | | CTTTAACATGAAAATTGTCGAGAACATCCCAGTAAGCGAAAAAAGTATATTTCGGATCAAACCGGAAAATAATC |
| | | TCAGCAAGTTTTACATCCTGAGCTACCTGTTACTGCCTGTCGAGTTACGGGGTGATTTTCTGGGCTATGTTAAAC |
| | | ATCACTATTATGGGATTAAGAATGTCGATTTCGAAGAAATACCGGATATTAAAGAAGATAAACCCAATGAAAAT |
| | | TCGGATTCTTTCTTTCATAACCTTCGTCTTTTCGAGAAAAACAGCAAGAAATTTGAACTGATAAAATATAGACTC |
| | | GTCGAATTTGGGAATCTTAAAGATCATCTGCCACGTATCTATGAGAAATTTGGGATAAAACCGGATGTGTTAGA |
| | | GTACATTGAAAATAGCGGGAATAAGGACTCAAAACTCTTTGATCGGAACATACTGTTACCCATCATGAAGTACT |
| | | ATCAGCATATCTTCAAACTTCTGAACGACATCGAAGTTCATGCTTTATTACGCTTTTCTGAAAAAGACTCAATTA |
| | | GTTTAGATGAGTCTATTAAAGAGTGCAGTAAAGGTAAGTTTCTCAATTTTGGTAAGCTGTTATTTTTGAGCCGTT |
| | | ATGGCCTCGAGGCGAAAAAAGATAATAAGTTTAAAGATATTTTTAACAGAGAGAATGGGCTGTCGATTACGAA |
| | | AGATGATGCGAAGACGGAGCGCAAAAAATACTTTGAAATCTTCGAGACGCGGAATAAGATCGCACACCTGAAT |
| | | TACAAACAACTGTTTCACGACCTTCTGTTTGATTCTAATATTAATATCAACAAAGAGCTCGAAGGCATTATTCAG |
| | | GAAACTAAAACAATTGGGTTGAACGCCCAGACTCTGGGATATAACTTTCTGAACGATTTTTACATGAGAAAGGA |
| | | AATGTTCATATCAAACCAGAAAAAGAGCTCAATGACATTAATCAACAATCCCTTATCCAAGGATAAAGACACAA |
| | | AGGAAATTGGCCTCTTGAAGCTGTATGGTTTAAGCAAGAGTCAACCGAAAGATCTGATCCTGGCGAAATATAAA |
| | | GAATTGATGAACCTGATTGAGAAAACAGAGGACAGCATTTTGAAAAAGAAAGATTTCCTTCCTGTAAAGGAAGT |
| | | TTCAATTACCGTAAAGAAATCTACCCCCAATAAAAAGGGTATAATGGTGGAGTTACCTGAAATTTTACAAATTA |
| | | AGGACCTGAACGAAATGGATCTCCTGGCTTATGCGTCAAATATTCGCGGTAAGCTTCACAAAGACTCTTCCGAT |
| | | CTTTTCGGTATCTACAAAAAATTGACCATCAAAGAGCTGAAGAAAAAACTGATAAACCTTTTCATCAAAGGAGA |
| | | AAAGCGCTATCTGAATCTTGAATTAGTGAATAAAACCGGGTATATGGCCATCTATGAATCTACCGGCCTGTATCC |
| | | GAAGAGTTACGAAATTCTCAACCATGAAATCTCTTTTAGCGAGATTTCCATGAAGAATTGGTACGAACATGATTT |
| | | TAAACCTATATTTCAGATAGATGGCTCACTGCCTAATAACACTGACTATAAGAATGGTGTTTTCATCTACACATC |
| | | CCCGTATGAATTTCGAGACAAAGAACTCATGAAAAAACAACGTACAGTGCATAAACGTGATATAGAAAAGACT |
| | | TTTTACAATGAGAACGATATGGATTATACTGGGATCTATAATCAGAAAATAAAAGCACTGTATTAA |
| 336 | JW13161 | ATGTTCAACGATAGTCAGGGCAATCAGATTGAGCAAAACGACAAAAGTTTTCTGGAAATCTTCTTAAACCAGGC |
| | | ACGTCTTAACGCGCACATTACACTGTGTCACATTTCAGATCTTCTGGGGGAAAATACCGTTGATGAAGATTCGTT |
| | | AGCCATTATGCCTGTCTTGCGGTTTCTCGAATCGGATAAAGACGCGGTAAAAAGTGAACGCACTTTCGAGCTGG |
| | | TGGAAAAACACTTTCCAATGCTGAAAGTCATCTATGGTAGCGGACCGAAAAAAGAAGAGGTTACCTTCTTGGGC |
| | | CGTACCAAAAAGTATAAGGAAATACTGGGCTGCTTCTTAAAGGCAGTAAACGGAAAGCGGAACGAATATTGCC |
| | | ATGCTTATAGCAAAAGTTCCGGGGATTACGATATCAAAACACTGACTCGCCATCTTGAAAACTGCTTTGATGCCT |
| | | CTGTGAGAAAAATTAAAGAGATCCGCTCCTTGGAAGAGGAAGAGGTTTTCCATCTTCGTAGAAAAACAAGCGA |
| | | AGGTAAAGGTAAAGAGAAAAGAGTGGTAGATAATCCAAATTTCCACTATCATTTCAAGAACGAGGAAGGCCAA |
| | | CTGTCCGAAAAGGGATTAGCCTTTTTAGTGGCTATGTTTTTAGAAAAAAAAGACGCTTATTTGTTTCTCAAGCGT |
| | | CAGCATGGCTTTCATCGTGGAGAATCTCCGGGCGAAAAAGCCACCCTTGAATCTTTTTGTGTCTTCCGGATACGC |
| | | TTGCCAAAGCCTGTTATGACCTCTGATGTGGACAAGAATGGGCTGGCCCTGGACATGCTGAACGATCTTAAAAA |
| | | ATGCCCTAAAGAGTTGTTCGAATTACTGGCCGAAGAAAAACAGCAGGAGTTTCGCGTGACAGATTCTGAAGATG |
| | | GGGATGAGGACGGCAATGAGATACTGATGCGCCGTTATTCAGATCGATTCCCCTATTTTGCACTGCGTTATTGTG |
| | | ATGAAAACGAGGTGTTTAAGAACATTCGCTTCCACATAGACCTTGGGCGTTACTACTTTAAGTTCTACGAAAAA |
| | | GATACAATTGACGGAAATAAGTACCAGCGCGCTCTGGATAAACGCCTGAAAACATTTGGTCGTATTAAAGACGT |
| | | CAAAAATAAGGTTCGGCAGGAATGGGGTGATATAATCAAAGCGCCAGACGAAATTTCGGATGAGCAGAATGAA |
| | | CCGTATAAGACCAATAGCACTCCGCATTATAATTTGGTTGATAACCAGATCGGGTTCACTATCTCCGGTGACTGT |
| | | AAGCTGCCTGATGTTAAACAACCGGAAGGAAAGATCTTACTCCAGAAGCCGGATGCCTGGCTGTCTATCTATGA |
| | | ACTGCCAGGCATGCTGTTCCACGGCTTAGGCTATGGTTTTAAAAAAACTGAGAGCCTGATAGAACAGTACATCA |
| | | TTCGGCAGCGGAAAATCTGTGAGGAAATTTTTCGCACAGGAACGATTCCAGCGAATGCAGGCGAGTTTTTACCG |
| | | AATGCTATCAAGGAAATAGGCACGGGTAATGAGACATCAAACGAATATGCGAAAAATAAACTTGATCGTAAGC |
| | | TGTCAGATACGCGCCAACGTATTAGAGCGATTAAAGCAACCAAAAATAGAATTGCCGATAAAAGTAACAAACC |
| | | GGGTAAGCGCAAGTTTTTTGATATTCGTGCTGGCAAACTGGCTGACTTCCTGGCCCGTGATATTATGGCATTACA |
| | | GGAGTTTGATCCAGCCAAAGAAGGTAAGGATAAACTGACTTCTATTAATTTTCAGGTACTCCAAGCGACTTTGG |
| | | CATTTTATGGGGCCAAAAAAAACACGTTAGCTGGTATGTTTAAGAGAATAGGCTTACTGGAAGGAGATAACCCT |
| | | CATCCCTTTATGAAAGAAATTGAACCTGGCAAACATAATAGCATTGTAGGTTTCTATGAAGCGTATCTGGATCG |
| | | GAAAGAAGCGTATTTGGAAGAATGCCGCAAAGGAGAAAACTTGGATAACTACCAATTCCTTCGTCCGTCCCGTC |
| | | AGCGATATGCAAAGGGTAAAAGAGACCTTAAAACCATAACACGCCAACTTCTGGATAACCCCGTCAATATTCCG |
| | | AATGGTTTCTTTCGAGAAGAAATTCGTGAATTTGTTTGTGAACAGGACGCTGGTCTGAAAAGTCGGAAAATGAA |
| | | TACTGCATATATGGTAGGCGCTAATTTTGAAAAAACGTACGGGGGCCAGCAACCTTTTCAGTACTATCAACGTA |
| | | ATTATCCGGTCGTACTCAAAGCTCAAGAATACTGTAAAAAGAGAGAAAATCGTGGCATTGCAGAGGTGTTACGT |
| | | AGTATTGCAGGTGAAATGTCATACCGAGAGATGGAAGCCTTTATTAAAAAAGAAATACCCGATAATGGTCGGTT |
| | | TGAACCTGAGAATCTTAAGAGAAATCTCTTAAACGGATGCAAAGACTTTAAAAAAAACGAACGACTCCTGCGCC |
| | | GTTACAAAGTGCAGGATATGGTCGCCTTTGCTATGGTGGAAAAAACATTGAAGGAACAGCTGTCATTTGATGGT |
| | | AACGTTGTTAAACTCGAGGCAATTACGCCGACAGAGGAAAGCCTGTTCAAAAAACCGATCTTATGTTCAACTGA |
| | | TATCGCGATTACGTTTAACACCAAACCCACGCACTATGACAATGGATATGTTGGGTTTATCCAGGAAAAATATG |
| | | CCGGGCATTATGCATCTGAAGGCAACAAAATCATCTTGAAGTATCGCATAATATCGGAGAATACCAAACTTAAA |
| | | GACATCGGGAAGTACCGTCGCTACCTTTATGACCGTCGGCTGCCGGGTCTCTTAATTTGGAAGTATGCGCCTAAC |
| | | GCCCAGTCAGACATTGAGATCAAGTATTCCGAGATCGAGGAAGAGATCAAAGCTTATGAACAATATCGCCTGCG |
| | | AATTGCAGAGCAGCTGTACGTATTAGAGACCAAAGTGATCGACTGCTACATTTGCAAAGATGAGCCAGGAGAG |
| | | GACTACATAAGCTTTAATGGTATTATAGATACGATTAAAGCGGAACAAGCCGGTAGCGAGGAGAAATGCGATA |
| | | CCTTACTCAGTATACGGAATGCAGTTTATCATAATCAATTTCCCGCGTTTATGGATGCGATCGAAAAAACGGAA |
| | | GGTGACAATATTGCGGGGAAAATGCTGTCGATAACTGAGGACTACGTTAAGTGTACCGTCGAGCAGATGAATGA |
| | | AGGAGATAAAGAATTCGTTAATGTGTAA |
| 337 | JW13162 | ATGAACAGTGTCGAATTGAAGAAAGAAGAAGCCGCGTTTTATTTTAACCAGGCGGAGCTGAACCTGAAAGCGA |
| | | TCGAAGATGATATTTTTGACAAAGGGCGCCGGCGCACACTGCTGGACAATCCAAGAATCCTCGCTGAGGTAGAG |
| | | AACTTTATTTTTAACTTTAAAGATGTTACCAAGAATGCGAAAGGCGAGATCGATTGCCTGATTTCGAAACTCCGG |
| | | GAATTACGCAACTTTTATTCGCACTACGTTCATAACGACAATGTGAAAGTACTTTCGAAAGGTGAAAAGCCAAT |
| | | TTTGGAAAAGGATTATCAATTTGCAATAGAGCGGACCGCTTCAGAAGATGTTAAACTGGAAATAGTTGATAAAC |
| | | GCGACAAACTTACCGATGCCGGGGTGCTGTTTTTATTATGCATGTTCCTGAAAAAGTCTCAGGCAAATAAACTTA |
| | | TCAGCGGCATCTCAGGTTTTAAACGGAATGATCCGACCGGCCAGCCCAGAAGAAATCTTTTTACTTACTTCAGTG |
| | | TTAGAGAAGGTTATAAAGTAGTTCCTGACATGCAAAAACACTACCTGTTATTCACGCTGGTAAACCATCTTAGC |
| | | AATCAGGATGACTACGTGGAGAATGTTCAACAACCTTATGATATTAGCGAAGGTTTGTTTTTTCATCGGATCGCC |
| | | TCGACTTTCTTAAACATAAGTGGCATTCTCCGTAATATGAAATTCTATTCTTATCAGTCTAGCCGTCTGAAAGAA |
| | | CAGAGAGGCGAAACAAAAAGTGATAAAGGATATTTTGAGTGGATTGAACCGTTTCAGGGTAATTCATATTTTAG |
| | | CGTGGATGGTCAGAAAGGTGTGATTGGGGAAGACGAGCTGAAAGAGCTGTGTTATGTCCTCTTAGTAGGCAAGC |
| | | AGGATGTGAATAAAGTCGAAGGCCGTATTACTCAGTTTCTTAAAAAGTTCAAAAATGCCGACTCCGTCGAGAAA |
| | | GTGGAAGATGACGAAATGTTGGACCGGGAAAATTTTCCGGCTTCATATTTTGCGAAAACTCGTGTTGGCTCAATT |
| | | AAAGGGAAAATCCTGAACCGATTGAAAAAGGCCATCGAATCAAAAAAAATCACCGGGGTGGATGTAAAAGCAT |
| | | ATAATAAGATGAAGGAAGTGATGGCCTTTATTAACAACAGTTTGCCTGTCGATGAAAAATTAAAACCGAAAGAT |
| | | TACAAACGTTATCTTGGAATGGTACGGTTTTGGGGTCGCGAAAAAATCAATATCGAGCGTGAATTTCGTAGCAA |
| | | AGGTTGGTCGAAGTATTTTACGAGTGGATTTTGGATGGCCAAAAATCTGGAAGAAGCTTATAAACTTGCGCGAC |
| | | AGAAAAACGCTGAACTTTTCAATAAACTGAAAACGGCAGTGGAAAAAATGAACGAGCAGGAATTCGAGAAATA |
| | | CCAACAAATCAATGATGCAAAAGATCTGGCTTCTTTAAAAAGATTAGCGCAAGATTTTGGTATGAAATGGGAAG |
| | | AAAAAGATTGGCAGGAGTACTCTGGTCAAATTAAGAAGCGTATTACTGATCGTCAGAAATTGACGATAATGAAA |
| | | CAGCGTGTTACCGCCGGTTTGAAGAAGAAGCATGGGATTGAAAACCTTAATCTGCGTATCACAATTGATTCAAA |
| | | CAAAAGTCGCCGCGTGGTCCTGAACCGAATTGCAATTCCCCGCGGTTTCATTAAAAAACACATTTTAGGCTGGC |
| | | AGGGATCTGAAAAAGTTTCAAAAAAAATTCGTGAAGCGAAGTGTAAGATCTTGTTATCCGGAAAGTATGAGGA |
| | | GCTGTCCCGCCAGTTCTTCAAGGCCAAAGACTACGATAAGATGACCCAGATTAATTCCCTGTATGAAAAGAATA |
| | | AACTCATCGCGTTAATGGCTGTTTATCTCATGGAGCAACTCAACATACAACTGAAGGAATACACAGAGCTGGGT |
| | | ACACTGAAAAAGACGACTGTTGACTTCAAGATATCCAATAAAGTAACGGAAAAAATACCGTTCTCTCAGTACCC |
| | | AAGTCTGGTTTATGCAATGTCCCGTGAGTATGCGGACAATGTGCATGACTATAAGTTTTCTGAAAAAGATAAGC |
| | | CTTTTTTAGGAAAGATAGATGCCATCGAGAAAGAGCGCATGGAATTCATTAAACAGGTCCTGGAGTTTGAGAAG |
| | | TACTTGTTTGATAATTCCATAATTGATCGAAAGAAATTCGCTGATACAGCAACCCATATAAGCTTCAAAGAAAT |
| | | AGTTAACGAGCTGGTCAATAAAGGCCGCGACGGGAATGAATTAACAAAACTTAAAGATGCACGTGACACAGCA |
| | | CTCCACGGCGGAATTCTGACCGGCACTAGCTTCGAAGAAACGAAAAGCCTTATCAATGAAATGAAAAAATAA |
| 338 | JW13163 | ATGTGTAACGAGATTCAGACTAACCAAACCGGGCAGAAAGACAATTCGCTTTTTGGCATCTATCTGAATCAGGC |
| | | TCGGTTAAACGCCTATATCGCATTGTGCTACATTTCAGAACTCCTGGGAGAAAAAACAGTGGATGAAGATTCAC |
| | | TGTCTGAAATGCCTGTCTTAAGATTTTTGGATTCTGACAAAGACATTGTGAAAAGTAAGCGCACCTTCGAACTGT |
| | | TAGAAAAACGTTTTCCTATGTTAAAAGTTATCTATGATGGCGAACCAAAAAAGGAACAGGATGACAAGTTCTTA |
| | | GAACGCACAAAAAAATACAAAGAGATTCTTACCTGTCTCATTAAAGCGTTAAACGACAAACGAAACGAATTCTG |
| | | CCATGCCAATACAAAAGGCGGCGGCGGGGAATACGACATTAAGCAGTTGATTCGGTACCTGAATAATTGTTTCG |
| | | ATGCGAGCGTTAGACGGGTGAAAGATGTGCGTGGGTTAGAAGAAGAAGACGTTTTTCATCTGCGTAGAAAAAC |
| | | GTCACAGGGTAAAGGACGCGAAAAGCGAGTGATTGACAATCCGAATTTCTACTATCACTTCCAGGACAAAGAG |
| | | GGCAAAATCTCTGAGAAAGGTTTGGCATTCCTTGCTTCTGTTTTTTTGGAAAAAAAGGATGCCCATGAGTTATTG |
| | | AAAAAGCAGCGCGGTTTCAAAAAAGATGATACCCCAGGATATAAGGCGACACTCGAAAGTTTTTATTGTTTTCG |
| | | GATAAAACTGCCTAAGCCCGTCATGAAATCAGACGAAGACAAAAATGGACTGGCTCTGGATATGCTCAATGAA |
| | | CTGAAAAAATGCCCGAAAGAAATCTTCGATCTCCTGCCAAAAGAACAGCAGGAAGAATTTCGCGTCATAGATAC |
| | | CAGCGATGATAATGAGGATGATAATGAAATTCTTATGAGACGCTACTCTGATCGCTTCCCGTACCTGGCATTACG |
| | | TTATTGCGACGAGAATGAGTTGTTTGAAAACCTTCGCTTTCAAATAGACCTGGGTCGTTATTATTTCAAATTCTA |
| | | TGAAAAACAAACCATCGACGGCAACACTCAACAGCGGTCCCTCGATAAAAAGCTGAAGACATTTGGTCGAATC |
| | | AAAGAAGTGAAAGACAAAGTTCAACAGCAATGGCAGGATGTTATTAAAAGTCCTGATGAGATAGAGGATGAAC |
| | | AAAAAGAGCCTTACAAAGCTAATACGACGCCTCATTATAATCTTGTGGACAACCAGATTGGTTTTGTGATGTCC |
| | | AGAGATTGTAATCTTCCAGATCTGAATCAACCTGATGGCAAACTGAAATTACAAAAACCCGATGCTTGGCTGAG |
| | | CATCTATGAATTACCGGGAATGATTTTTCATGGTTTGACGAGCGACTTCAAACAAACTGAGATTTTAATCAACAA |
| | | GTATATTGGTCGTCAGCGGTCGATTTGTAAGAAAATTTTCGGCACCGGTAGCATCCCGCAGGATGCTGGTGAAT |
| | | ATCTGCCAGAGGCACTCAAAGATATTGAAGAGAATGATACTAAACGGACCTCGTATGCGAAAAAAAAGTTATG |
| | | CAGAATCCTTGAAGACACAGAACAGCGGATAAAGGCTATTAAAAAAACCGAGCAACGTCTGGTCGATAAAAGT |
| | | AATAAGCCCGGTAAAAAGCAGTTCTTTGATATACGTGCAGGCAAACTTGCAGATTTTTTGGCTCGTGACATAAT |
| | | GATATTACAATCATTTGATCCGGCCAAAGATGGTAAAGATAAACTGACATCTATCAACTACCAGGTTCTGCAGG |
| | | CAACCCTCGCATATTATGGCGCGAAAAAAGATAGCATCGCCGACATGTTTAAAACTATTGGATTGTTAGACGGA |
| | | GATAACCCTCATCCTTTTCTGAAAGAAATCAATCCTTCGAAGTATAACTCAATTGTTGAGTTCTACAAAGCCTAT |
| | | CTGAATCGAAAGAAAGGGTACCTGGAAAAATGTGAAAAAGAGGGTAAGTTTGATGAACAGTTCCTGCGTCCCA |
| | | GCCGCCAGCGTTATGCAAAAGGCAAACGAGATCTGAAAACTATCGCGAAACAGCTGTTAGATAACCCGGTCAA |
| | | TATTCCGAAAGGGTTCTTTCAGAAGCAAATCAAAGAATTTGTATGCGTACGTGAACCATCTTTGGAAGAGCTGC |
| | | AGATGAATACTGCCTATATGATTCAAGCCTATTTTGAGAAGGAATACGGGACGCAGCAGCCGTTTTGCTCCTATC |
| | | AAAAGACATATCCGGTAGTCTCCAAAAGTACGGAGTATTGTAAAAAAGCGAAAAACAAAGAGATCAAGGAAGT |
| | | CTTGCGCAAAATTACCGCAGAAATGTCATATCGGGAACTGCGTAAGTTTATTGATAGTAAAATACCGGACGGCC |
| | | GTTATGAACCAGAGAATCTGAAAAAGAATCTTCTGGATGGGTGTCGTGACTTCAAGAACAATGAGCGCCTCTTA |
| | | CGCCGTTTTAAGGTACAAGACATGGTAATGTTTATGATGGTTGAAAAAACTTTAAAAGATCAACTGGCGTTTGA |
| | | AGGTAATGTAATTAAGCTTAAGGATATTACCCCAGTGGAAGATTCTCCCTTTAATAAGCCCGTGTTTTGCAGCTC |
| | | AGACGTCTCCGCTAGTTTTAATACCAACAAAAAGTACGAGAGCGGATACGTTGACTTCATCAAAAAAAACTACA |
| | | AAGGCCTCTACATTTCCCAGGGCGGTCGCATTATATTGAAATATCGCGTAACGTCTGAATCCACGAAGCTTAAA |
| | | GATATAGGTAAGTATAGACGCTATCTTTATGATCGAAGACTGCCGGGATTACTGATATGGAAATATCCGCCAAA |
| | | TATTGAAGGGGGTATAGAGATTAAGTATGCCGACATAGAAGAAGAAATTAAAGCGTACGAGAAATACCGTAAG |
| | | CAGATTGTGCAACAGATCTACATGCTGGAAAAAAAAGCCGTTGATCACTTTAAACTTGAGATTGAGCCGGAAGA |
| | | AAATCATATCCCCTTTAATACTGTGACGGATACTATTAAGTTTCGTTTGGCAGGGAGCGAAGAGAAATGCGATA |
| | | CACTTCTGAACATCCGCAACTCGATAAACCACAACCAGTTCCCGGTTTTTGATGAAAAAATAGAGAACGCCCAG |
| | | GGACAGAGTATCAGTGAACGTATGTTTTCAATCACGGAGAATTATGTAAAGTATATTACAGAGCACATCACAGA |
| | | GTCGGATAAGGACTTTGCGTATGTTTAA |
| 339 | JW13164 | ATGTTATGTCCGCGCGCCATCTTTTCGACCTTATTCAACTTTGTACACATGGAAGCAAAACACACCATACAGTAC |
| | | TTTGACTTCACCAATATCAAGCATAAACATTTCTTTGCAGGTCTGTTAAACACCGCTCAACACAACTTTGATCTT |
| | | AGCTTACGTGAATTAGCAAAAAGAATTCACAATAAGGATACGACCAAAGGGTTGATTACAATTGCCTTTAATAA |
| | | TTCGGTGTCTGAAAGCGATTTCAAAGCCCGTACTAATTACTTGTCAGAAAGTTTGGCGTTCATTAAACTGATGAA |
| | | CTATGAGAATCGTGCGGAATTCCGCGACACACTGCTGGTGCTTTATAATACAATTGACGGGCTGAGAAATTACT |
| | | ATACACATTATAAACGCGATAAAATTACGATAGACGAGTCTGTATACAAGCTTCTCGATTATCTTCTGCTGACAT |
| | | CAGCAAAAGAAGTTAAAATTAATCGCGCGAAAAGTGAAGAGTATAAGAAGTACCTGAGCATTAAGTATCAGGA |
| | | CGAATTTGAAGAGATTATTGACGAGAGTAACAAAAAAATTGAGGAAGATAATGCGCTGTTAAAAAAGGGGGAA |
| | | AGAAAAACTGGTTTAATTAAGCCACAAGATGAAGTTAATCATGTCCTGAATAAAGTCTTTCGGTCCTTTCTGTAT |
| | | AAGAATGATAAAGGGGAAGATGAACTGCGCGATAATGCTAGCTCAAAAAATAAAGAAGACACAGATTTGAGTA |
| | | CCTATGGCTTTGTACAACTCTTAGCCTTGTTCCTGAACAAAAAACAAACAGAATCTTTGCTGTCGTATACGAAAT |
| | | ACCTTAAAGACACGAGAAAACTGAAATTCGTAACTTCCCGTTGGACCCTGACCTTTTTATGTTATAAGGATATTA |
| | | AACGGTTATTCAAATCCGACTACTCCAATGATTCTCTTCTTCTGCAAATGATCTCTGAACTGACCAAGTGCCCAA |
| | | ATGAAATCTATCGACAACTGACTCCTGATAAAAAACAGGAATTCATAGAAGACATTAACGAGTATTATAAGGAC |
| | | ACCATATCTTTTGAAGGAACCAACGAACAAGCTCTCGTAAGTCATGAAGTTATTCAGAAGCGTTACGCTAATCG |
| | | CTTCAGCTACTTCACGATTCGGTTTCTGGATGAGATCATTGATTTTCCCACACTCAAATTTCATGTTAATCTCGGC |
| | | AAGTTTAATCATGACACTACCAAAAAGAAGTTTTCTAACGCCATAGAGACGGAACGATCAATTTTAGAAAAAAT |
| | | TACCGTGTTTACAAAGCTTAGCACGGCAACGAATAATAAAAAGGACTATTTTTCCAAACCGGAGAATAAAGAGT |
| | | TGGAAAACGATTGGTTAGAGTTCCCCATGCCATCATACCAGTTCAACAAAAACAATATTGGTATATGGCTGTCA |
| | | ATCGATAAAAAATCCGGAGAATCCGACGCCCCAGAAGAGCGGGAGAACAGTAAACTGAGCAAGTATAAGATCG |
| | | CGGAAAAATTGTTACTTAAAAATACTATTCGGAAACCGATTGCGTTCCTGAGCTTCAATGAACTGCCTGCCCTGC |
| | | TGTATTCACTGCTGATCGAAAAGAAAACTCCGATTGAGATAGAGAAGATTATACAGAGTAAGATAATCGAACA |
| | | GCGTAAACTTATTAGCTCATTTGACAAGACTAAAATTATCTCGAACAAACGTTTACCGAAAAAATTAATACGTG |
| | | CGTCTCATCTTGATTCAACCACGGATGTCAAAAAATTGGAAAAAGACATCAAGACTGAGATAAGTAAAGATCCG |
| | | ATCGGTGATATTCGTAAACATTATAAGAAGGAGATCAAAAATGTGAATGAGTTCACTAATAGTGAAAAAGGTA |
| | | AAGTTACGACCTGGCTGGCCGATGATATCAAACGTTTTACCAGTAAAGAGACACGCGAAAATTGGAAAGGATAT |
| | | CAGTACGCAGAATTTCAGGCATTACTGTCCTTCTATGACATCAACAAAGACAAACCTAAGAGCTTTCTGGAAAA |
| | | AGACCTTAACTACGACTACAAAAAAGATAACTCCTTTAACGGCCTGAACTTTAATCTGAAAACCCTCTTCGATTT |
| | | TTACAACTCTTACCTTAAAAATCGCCGGGAGTACCTCAACAATTTGTTAAAAGAAATCGAGTCGTCTAAAGATG |
| | | AAATTCATGAAAAAGTGTTTATAGGTTTCACGAAGAGATTGTATGAAATCAAACCGATCGACATCCAGAAGAAT |
| | | GTATTTCTCAAAAAAATCCCACTGAACCTGCCTCGCGGAATTTTTGATGATAAACCGACTAGTTATGATAAAGGT |
| | | GGTAAGGATAATACAGAAATTGCTTCGTGGTTTACACTGAGTAGTAAAGCTGAAAATGCTCAACTGTATTATTG |
| | | CTTCCCTAAAGTGTATTCTTATCCCACAACAAAACTGAAATGGGATAATAGAAAACGTCGTAAAATACAGAAAT |
| | | CGAGCATCGCAACTCAACTGATCTCACCCAAAGAACGCCTGAAACAACAGTATTTGAAAGATCTTCCGAAAACT |
| | | GTGCAGGTTGAAATCTACAAAAACGAAAAGTCAATTCGGAAGATTATGAGAGAGGATTTTTTCATTTTAGAAAT |
| | | GGTCAAGCACTTGCTGAAAAAGTCAAGCATTAAAGGCCTGGATAAACTCCAGTTAAAGGATGTTTTTTTAACAA |
| | | AAGAAGAGAAGAACCGCCGTATAGTAGAGAGCTTAAAACAGTCTCAGCGTGTGAAAGGAGATAAAATGGAGA |
| | | ACGTGGTTAATGACTCTTATATTTTATCCCAGCAGGTTGCGATATCTATTCTGAACGACAAGATAATCGACACCG |
| | | TTCAGATCAAGACTATTGGCAAACTTCGTCGATTAGAGGAAGATAAACGAGTCCGTCAACTGATCGAATATTTT |
| | | CCAGATAAACCTTCGTGGACGGTTTTAGAGATTCAATCAGAAATTGATGATTATGATCGGGTGCGAAAGTTTGA |
| | | ATTTTTTAGCTCCGTCCACGTGCTGGAGAAGCTTATCTATAAAGATGCGAAGAAAAATAATGCCAAAGAGGGCC |
| | | TTCTCCAGAATAATAACCATAATTTTCGTAAGTACTTGAGCTATTACTATCTCAACGAAGATCGTGATGCTTTTA |
| | | ACTCATTACCGAATTTCGACACCATAACGATAGATAACCCTTCAATCAAAAGTGAATGGTATCGCCTGTATCTTT |
| | | TGGTTAAGATTCGCAACAAATTTTCCCACAATCAGTTATTGAGTAAAGTCGATTTTGACTCGTTAAAAGAGATTA |
| | | TCAGCATGAATTCTGGCGAAAAAATTGCCGCATTTCTGAACCGCGCATTTGATAAACTCATTATAGTCAAATAA |
| 340 | JW13165 | ATGAACAATAACGCGACTATTCAGAAACAGTCTGTTATCTATGCATTCGACAAAAGTGAGGACAAACACTTTTT |
| | | CGCCGGGTTGTTAAACATGGCTGAGTTAAACTTAGTTATCGCCCTGCAAGAGACCCTGATTCGGACCATTCGCA |
| | | ACACGAAAACAAGCAACAATGCGAAGGTACTTATCCAACAACTGTTCACTGAAGACATCATGCAAAGCGATTG |
| | | GAATTATCGGGTGGAAGTCCTGAGTGAATTTTTGCCCGTTACTAAAGCCCTGCAGCCACAGGCCGATAAAGCTA |
| | | CGTTTATTAAAACATTGACCCTCTTTGCCGAAACGCTGAACACCTTACGCAATTTTTACACTCATCATTACCACC |
| | | CGCCTGTGGAGATTGATTCAAGACTGTTTGAGATTCTGGATGCCGTACTGCTGCATAGCGCGGTTTATGTTAAAA |
| | | AACAACGCCTGAAAACGGAAGATGGCAAAACCATGTTTCCGAAACAATATGAAGATGATCTTCGTACCAAACTT |
| | | GCCATACATAATGAAGGGGTGAAGCAGAAACGCATAAGCGAGAGAGAAAAACCGGAAAATAAAAAAATCCCG |
| | | AAGAACAAGTTCAACGAAATCTTCAACAAAAAGAACAAGACTTACAGTGAAGCAGATTTTGTGAATACATATCT |
| | | TAATGGGGTGTTTCACCATTTGTTATACAAAGATCGTAAAAAGGAAGGTTTGGACCAGCTTAAAAAAGATGCCG |
| | | CATCCAAGAAAAAGGACGAGAATTATTTTAGCAAAAACGGATTCGTCCTGTTCCTCTCGTTTTTCCTTGACAAAA |
| | | AAAATCTTGAAGACCTTTTTTCTCATACAGAACATTTCCGCGGCACCCACGAATTACGCTTTATGGTTACACGTT |
| | | GGGTGTTTTCTCTGCATGCTTTTCGTGATGTCCGTCGTGTATTACGCTCAGATTACTCGAATGATGCCCTGCTTCT |
| | | GCAAATGATAGGAGAGCTGAACAAGTGTCCAAAAGAATTGTTCAATATTCTCTCGACAGAACACCAGCTGGAAT |
| | | TTTTCGAAGATCTTAATGAATATTACTCTAATAATGAAGGCGGAGATGAATCTCAGCCGGATTCTTTAGTAACGC |
| | | ATACCGTGTGGCGGAAACGCTATGATGATAAGTTTTCTTATTTCGCGCTGCGATTTTTAGATGAGTTCGCTGGCT |
| | | TTACGAACTTGAAATTCCAGGTCGTGGTCGGTAATTATGTCCATGATTCCCGTACAAAAGAACTCGCAGGCATC |
| | | AATAAAGTAACCTACCGTACGATTAAAGAAAAGATCAAAGTGTTTGGTAAACTGAGCGAGATTGATCGGCTGA |
| | | AAAAGGAATATTTTCTGAAAAAGAATCAGGAGCAGCAGGTTTCAGATCCAACGACAGAAACAACCGAATTAAG |
| | | CGAAGGTTGGGAAGAATATCCTGTGGCACACTATAAACTGGATAACAATAATATTCCGATCTATCTTAGCATTC |
| | | CAGGTTTTCAGAAGGATAGCACGCCTAAAGAATATCGCACCAAACGCCTTAACAAAAAATCTATTTTAGAACAG |
| | | CTCACTACCACCGGCTTTATAGAATCTGAGCCTATCGCCTTTTTATCGGTCAATGAGTTGCCCGCGCTCTTGTATC |
| | | AGCTCCTTTTCAATAACAAGAGTGCGGCACAGATAGAGACCATGCTGATCCAAAAAATCACATCCCAGGTGTCA |
| | | GAGATCAAGCGGTTCAACACGGAATCAACTATTGATAAACATAAAATTCCCAAGAGACTGATCCAGTTAGCCAG |
| | | CACTATAGCTACTTCCACAAGTATCAATTTTGTTAAACTGTTGAAAGACATCAATTCGGAGATTGATACGTGCAA |
| | | TAGCCGTCTGAAAGAGACGGATGATAACCTTAATAAAAGCAAGTATAGACGCTTTAATAACAAACAGCGCGGC |
| | | AAAGTTGCGACTTGGCTGGCAGACGATATCAAACGTTTTGCTGGTAAAGATATTCGATCTAATAATTGGAAATC |
| | | TCATCTGCATGGTGAACTGCAGGCTCTCTTAGCATTTTACACTGAGCGTAAAGCGGACATCCAGTTACTGTTGGA |
| | | GAAAGAACTGGGACTGCCATTAGACAGTAAAAGTTTGCTGTCAACCAGCTTTTCCGAAAACACGTTAGAAGGAT |
| | | TTTATGTAAAGTATCTCAAGACTCGTCGCGAAATACTCACTGACTTTAAAGCATCCGTAGATAAAACAAAAAAT |
| | | GAGTATCCCAATTCATTGGATACATCCACCATAGAGCCACTGTTTGACATTTTTGATAAGCGCCTCTATGTAAGT |
| | | TCACACATTGAGAAATATAAGTCAGACCTGTTACAAAAACCTCTGAACCTGCCTCGAGGCATATTTGATACCGC |
| | | GACTTATTTTCCACTGCAGAAAGGAGATAAAAGTAATTTTCAGCCTTGGTTTGAAGTTGCGGCTAAGACAGAAC |
| | | ACTACCAAGAATTCTACAATTTTCCGAGAAAGTATGAAACAATTGAACTTAATCCGGTGTCCGGTAAAGGGCTG |
| | | TTAGAACAAAACAATAATAAACCGGTTGATCCGGACGTGTTTAAGAATGAAAAAAGATTACGGGAAATTGCGC |
| | | GACAGGACTTCTATGTTCTGGAAATGGCAAAGTACATGATTAAGCACATGTATCCCGCTATTCGTACCAGCCAA |
| | | AATTACACGTTGAAGGACGTGTTCAAAACAAAACAGGAAAAAGAACAGATAAAACTTCGTGCAGCCCAACAAT |
| | | CCCAGAAAAAAGCGGGAAGTGGTGGTGAACATTTTACAGATGATTCTCATCTTCTGTTACGTCGTTTTCCGGTAA |
| | | CCGTAGCTATTGGTAACAAAAAAATAGTAGATTATGTTGCACTTAAGGACATTGGCAAGTTTCGGAGATTGGAG |
| | | AAGGACAATCGTATAAAGCTGTTATTATCATATTCAGAGCAAGAAATTTGGACCGTGAAAGAGATTGAGGATGA |
| | | GATAACGAACTACGAGCATATCCGTAAACAATCGTTTTTCAAAGAAGTGCATGTCTTCGAGCAGGAAGTGCTGC |
| | | AGAAAGTTAAGCTGAAAGCCGGTATAGACACTCACCCAGAAATTCTGGAACAAAATGGCTACCCTAATTTCAAA |
| | | CACTACGTCGCTTACCATTTTTTTAACAATGACACCATCACCTTCGACAAGTTTGTCAAAGTTGATTTCCAGAAC |
| | | GAGAAAAGTCGGAAAGAAATTGTTGAGTCAAAAAACATGTTATTGCTCAAAGCGTACTTCTTAGTCTTAATTCG |
| | | AAACAAATTCTCCCATAATCAGCTCCCGGAGAAGGTTGATTTCCTTAAAATGAACGCATATATCAAATTTTCGGG |
| | | GGAGAAGATTGGGGACTATCTGCTGCATTTTTTTAAAGAAAGTATTGTTTATTAA |
| 341 | JW13166 | ATGAGCGCTATGACTAAAGGGCTCCGTAACTGTAAGGGATGTGTTAATATGAAAAAAAAGATGAGCTTACGGG |
| | | AGAAGCGGGAAGCTGAAAAACAAGCCAAAAAAGCGGCTTATAGCGCCGCCAGTAAAAACACGGATAGTAAAC |
| | | CTGCGGAGAAAAAAGCAGAAACCCCAAAACCAGCAGAGATAATTAGTGATAATTCGAGAAATAAAACTGCCGT |
| | | GAAAGCTGCAGGGTTGAAAAGTACAATAATTTCTGGAGATAAGCTGTACATGACCAGCTTTGGGAAAGGCAAC |
| | | GCTGCCGTTATCGAACAAAAAATCGATATCAACGACTATTCGTTTTCCGCGATGAAAGATACGCCGTCATTAGA |
| | | AGTCGATAAAGCTGAATCTAAAGAGATTTCGTTTAGTAGCCATCATCCGTTTGTCAAGAATGACAAACTGACGA |
| | | CCTATAATCCTTTATATGGTGGCAAAGACAATCCTGAAAAACCTGTAGGCCGGGACATGCTGGGTTTGAAAGAT |
| | | AAACTTGAGGAACGCTATTTCGGGTGCACGTTTAACGATAACCTGCACATCCAGATTATCTACAATATCTTGGAC |
| | | ATCGAAAAGATATTGGCTGTTCATTCCGCAAATATTACAACCGCTTTAGATCACATGGTAGACGAGGACGATGA |
| | | GAAATATCTGAACTCTGACTACATCGGCTACATGAATACGATAAACACTTATGACGTTTTTATGGACCCGTCGAA |
| | | AAATAGCTCGTTATCACCCAAAGACCGTAAGAATATTGACAATTCGCGAGCAAAGTTTGAAAAACTGCTCAGTA |
| | | CTAAACGACTCGGCTACTTTGGGTTTGATTACGATGCGAACGGAAAAGATAAAAAAAAGAACGAGGAAATCAA |
| | | AAAGCGCCTTTATCACCTCACAGCCTTTGCCGGACAGTTGCGACAATGGAGCTTTCATTCTGCGGGTAATTATCC |
| | | AAGAACATGGTTGTACAAACTGGACTCATTGGATAAGGAATACCTGGATACCTTAGATCACTACTTTGACAAAC |
| | | GCTTCAATGACATTAACGATGATTTTGTGACAAAAAACGCCACCAATCTCTATATCTTAAAGGAAGTGTTTCCGG |
| | | AAGCAAATTTCAAAGATATCGCGGACCTGTACTACGATTTTATTGTCATCAAGAGTCATAAAAACATGGGCTTC |
| | | AGCATAAAAAAACTGCGTGAAAAAATGCTCGAATGCGATGGCGCAGATCGCATCAAAGAGCAGGACATGGACA |
| | | GCGTACGCAGCAAGCTCTACAAACTGATAGATTTCTGTATTTTTAAGTACTATCACGAATTTCCGGAATTGTCCG |
| | | AGAAAAACGTTGATATTTTAAGAGCGGCTGTATCTGATACTAAAAAAGATAACCTGTATTCTGATGAAGCCGCA |
| | | CGTTTATGGTCAATCTTCAAAGAAAAATTTTTAGGTTTCTGCGACAAAATCGTTGTGTGGGTCACAGGCGAACAT |
| | | GAAAAAGATATTACGTCAGTGATTGATAAAGATGCATATCGCAACCGCTCAAACGTTAGTTATTTTTCAAAGCTT |
| | | ATGTATGCAATGTGTTTCTTTCTGGACGGAAAGGAGATTAACGACTTGTTGACGACCCTGATAAACAAGTTTGAT |
| | | AATATTGCCAACCAGATTAAAACCGCCAAAGAGCTGGGTATTAATACAGCATTCGTTAAGAACTATGATTTCTT |
| | | CAATCACAGTGAGAAATATGTAGACGAGCTGAACATCGTCAAAAATATTGCAAGAATGAAGAAACCATCCTCA |
| | | AATGCCAAGAAAGCCATGTATCATGATGCTCTGACAATACTGGGTATTCCCGAGGATATGGATGAAAAAGCATT |
| | | AGATGAGGAGCTGGACCTGATTCTGGAAAAAAAGACCGATCCAGTGACGGGTAAGCCGTTAAAAGGTAAAAAT |
| | | CCCTTACGGAACTTTATCGCGAACAATGTGATAGAAAATTCACGTTTCATCTACCTTATAAAGTTCTGCAACCCT |
| | | GAAAACGTGCGCAAAATTGTTAATAATACCAAGGTCACCGAGTTTGTTCTCAAGCGCATTCCAGACGCCCAGAT |
| | | TGAGCGCTATTATAAGTCTTGTACGGATTCCGAGATGAATCCGCCGACAGAAAAAAAGATTACCGAACTGGCGG |
| | | GGAAACTTAAAGATATGAATTTCGGTAATTTTCGTAATGTTCGTCAGTCAGCCAAAGAAAATATGGAAAAAGAA |
| | | CGCTTTAAAGCTGTAATTGGTTTATATCTTACAGTGGTTTACCGGGTGGTAAAGAATCTTGTCGATGTCAATTCT |
| | | CGTTATATTATGGCTTTTCATAGCTTAGAACGCGATTCTCAGCTGTACAATGTATCCGTTGATAATGATTATCTTG |
| | | CACTTACAGATACTCTGGTGAAGGAAGGTGACAATAGTCGTAGTCGTTATCTTGCAGGAAATAAACGGCTGAGA |
| | | GATTGCGTCAAACAGGATATAGATAATGCGAAAAAATGGTTCGTTTCAGACAAGTATAATTCCATTACTAAGTA |
| | | TCGTAATAATGTGGCCCATTTGACTGCGGTGCGTAACTGTGCGGAATTCATAGGCGATATTACCAAGATCGATA |
| | | GCTATTTTGCACTGTACCACTATCTTATTCAGAGACAACTGGCGAAAGGCCTGGATCATGAACGATCTGGATTTG |
| | | ATCGTAACTATCCGCAATATGCGCCTCTCTTCAAATGGCATACTTATGTAAAAGATGTTGTGAAAGCACTGAACG |
| | | CTCCCTTTGGGTATAATATTCCGCGGTTTAAAAATCTTTCTATAGACGCGCTGTTTGACCGGAACGAGATCAAAA |
| | | AAAATGACGGTGAAAAAAAATCCGATGATTAA |
| 342 | JW13167 | ATGTCAAATGAAATTGGCGCCTTTCGGGAACATCAGTTTGCCTATGCTCCTGGGAATGAAAAACAAGAAGAAGC |
| | | CACATTCGCAACGTATTTTAATCTTGCGTTAAGCAACGTGGAAGGTATGATGTTTGGAGAAGTGGAATCAAATC |
| | | CCGATAAGATTGAGAAAAGCTTAGATACGCTGCCGCCTGCAATCTTGAGACAGATTGCATCTTTTATTTGGCTGA |
| | | GTAAGGAAGATCATCCAGATAAAGCCTATTCGACGGAAGAAGTTAAAGTTATCGTGACTGATCTGGTTCGTCGT |
| | | TTGTGTTTTTACCGCAACTATTTTTCTCATTGCTTCTACCTGGATACTCAGTACTTCTACTCCGATGAACTCGTTG |
| | | ATACTACAGCTATCGGCGAAAAGCTGCCGTATAACTTCCACCATTTTATTACCAATCGGCTGTTTAGATATTCAC |
| | | TGCCTGAAATAACCTTATTTCGCTGGAATGAAGGAGAGCGAAAGTATGAAATTTTGCGCGATGGCCTCATATTTT |
| | | TCTGCTGTCTTTTTTTAAAACGCGGACAGGCAGAGCGCTTTTTGAACGAGCTGCGTTTCTTTAAACGGACTGATG |
| | | AGGAAGGTCGGATTAAGCGTACAATTTTTACTAAGTATTGCACCCGTGAGAGCCACAAACATATAGGTATCGAA |
| | | GAGCAGGACTTTTTGATTTTCCAAGATATCATTGGTGACCTTAACCGCGTACCCAAAGTGTGCGATGGTGTGGTT |
| | | GATCTTTCTAAAGAAAATGAGCGTTATATCAAAAATCGTGAGACATCGAATGAATCAGACGAGAACAAAGCAC |
| | | GCTATAGATTATTAATAAGAGAGAAGGACAAGTTCCCTTATTATCTTATGCGATACATCGTGGACTTCGGCGTTC |
| | | TTCCGTGTATTACCTTTAAGCAGAACGATTACTCAACCAAAGAAGGAAGAGGGCAGTTTCATTATCAGGACGCT |
| | | GCCGTAGCCCAAGAAGAGCGGTGTTACAATTTTGTAGTTCGTAACGGCAATGTGTATTACTCCTATATGCCACAA |
| | | GCTCAAAATGTAGTGAGAATTTCTGAGCTCCAGGGCACGATAAGCGTAGAAGAACTGAGAAATATGGTGTACG |
| | | CTTCCATCAATGGGAAAGATGTCAACAAAAGTGTCGAGCAGTACCTGTATCATCTCCACTTGCTGTATGAAAAA |
| | | ATCCTGACCATTAGTGGTCAGACGATTAAAGAGGGAAGAGTGGACGTTGAAGATTATAGACCTCTCCTGGATAA |
| | | ACTTTTACTGCGGCCGGCGAGCAACGGGGAAGAATTACGACGCGAGTTGCGCAAACTGCTGCCGAAACGGGTTT |
| | | GCGATCTGCTCTCTAACCGTTTTGATTGTTCTGAGGGAGTCTCGGCAGTAGAGAAACGCCTGAAAGCGATTTTAT |
| | | TGCGCCACGAGCAACTGCTGTTATCGCAGAATCCAGCCCTGCACATCGATAAGATTAAGAGTGTGATCGACTAT |
| | | CTTTATTTGTTCTTTTCCGATGATGAAAAATTTCGACAACAGCCAACCGAAAAAGCACATCGGGGCCTGAAAGA |
| | | TGAAGAATTTCAGATGTATCATTATCTTGTTGGTGACTATGACTCACACCCACTCGCACTGTGGAAAGAACTGGA |
| | | AGCCAGTGGACGGTTAAAACCAGAAATGAGAAAACTTACCAGCGCTACCTCTTTACATGGGTTATACATGTTAT |
| | | GTTTAAAAGGCACAGTTGAGTGGTGCCGCAAACAGTTAATGTCGATTGGCAAAGGCACAGCGAAAGTTGAAGC |
| | | CATAGCCGACCGTGTAGGGTTAAAGTTATATGACAAGCTGAAAGAGTACACACCGGAACAGCTCGAACGCGAG |
| | | GTCAAACTTGTTGTAATGCATGGTTATGCGGCTGCTGCTACTCCTAAACCGAAAGCGCAAGCGGCGATACCGAG |
| | | CAAACTTACAGAGTTACGATTTTATTCGTTTCTGGGTAAACGCGAAATGAGTTTTGCCGCGTTTATCCGTCAGGA |
| | | CAAAAAGGCTCAAAAACTGTGGCTCAGAAATTTCTACACGGTAGAAAATATTAAAACGCTCCAAAAACGTCAA |
| | | GCGGCGGCCGACGCAGCCTGTAAGAAATTATACAACTTGGTTGGTGAAGTCGAACGCGTCCACACCAACGACA |
| | | AGGTGCTGGTTTTGGTCGCACAGCGTTATCGGGAGCGCCTCTTAAACGTCGGTAGTAAGTGCGCGGTCACACTG |
| | | GATAATCCTGAACGACAGCAAAAACTGGCAGATGTATATGAAGTTCAGAATGCATGGTTGTCCATTCGTTTCGA |
| | | TGATCTTGATTTTACCTTGACCCATGTTAATCTTAGCAACCTTCGTAAAGCATACAACCTGATTCCCCGTAAGCA |
| | | CATATTAGCGTTCAAAGAATATCTTGATAATCGAGTGAAACAGAAGCTGTGTGAGGAATGCCGCAACGTCCGTC |
| | | GGAAAGAGGATCTTTGTACTTGCTGTAGTCCCCGTTACAGTAATCTGACATCCTGGCTGAAAGAAAATCATAGC |
| | | GAGTCATCAATAGAACGTGAAGCTGCAACGATGATGCTGCTGGATGTGGAACGGAAACTGCTGTCCTTCTTACT |
| | | GGACGAACGCCGTAAGGCAATAATCGAATACGGGAAGTTCATTCCGTTCTCTGCGCTGGTGAAAGAGTGCCGTT |
| | | TGGCAGACGCCGGTTTATGTGGCATCCGTAACGACGTTCTGCATGATAATGTAATTTCTTATGCCGATGCAATCG |
| | | GTAAACTGAGCGCTTATTTTCCGAAAGAAGCGAGCGAGGCCGTCGAATATATTCGCCGTACTAAAGAAGTGCGT |
| | | GAGCAGCGTCGCGAAGAGTTGATGGCTAATTCTTCACAGTAA |
| 343 | JW13168 | ATGAAAGTAGTCAAACCATGTGGAAACTCAGTTGTGTTAGCTGGCGGTGAAATTCGCCGTACAATACAGCCGAG |
| | | CATCACCAGTATTACTTCTGTTAATGCAAAACAAACGCATAGACCGGCGATAGATTTTTTATTGAACAACGAGA |
| | | AATTTTTTTTGGCTCAATGGGCCTCAATGCTGGATAAAATAATCTCTAAACCGCATCAGGCAAATCAGGCTAGCC |
| | | CAAATTATGCCACCTACGAAGCACGCGAAAACCTCAGCAAGGCGTTCTACGTGCTGTGGAAAGACAAAAAACT |
| | | GCTTAACAATTTCTCACACAAGGACAACCAGCGAAAAAGTTTCAATCAACAGTGGGGACTGAAAGTACATCCAT |
| | | ATAAGAAACCTAATAAGCCCACCGCAAATAATAAACCGGAAGCTATTAAAAAAGCGGGAGAGATTTCCAAAGG |
| | | CAGATGGTATGATTCTTTAGTGACAAAAAGTAAACCTAACAAAAATACGGCCAAGCACCACAAAAGTGCCACG |
| | | ATTCACTATAAGAACACCGCGAAGATAATCTATGAGCATCTTTATGTAAAACAACGTAGTATCTCAAAAAGATC |
| | | AGCATATCCTCAGGGCTATATCGCCAATCGCGCAAACTCAATCGAAAAAAGCGTTCACTCGTTCACGCTCAAAG |
| | | ATAACAAGCTGGCAACTTTATGCATTAACGATCAGCACCGTATCAATAGACTGACAAAACAATCCATATCCATT |
| | | GCACAGCCGTCCAAGTATCGCCTCGATGGCCTGATCAAGGACCTCAAAATTAAAACGAAACAATATTACCAGAA |
| | | TAAAGTTTCGGCTGCAGAGTTACGCGCCAAAAAAACAAAAAGACCGGTAAAACCGCCGCTGGAAAATCAGCAG |
| | | TTGCCCTTAAAAGAAGCGATGATTTGTTTATATGAACACTATGCTCGGATTTTCGGGACCGTTACAAAAATTGAA |
| | | ACCATAATTATTAAGGAACCGGAATTGTGGCAATATCACTGCCTGATCAAGAGTACTTTAAAACAACGCTACCC |
| | | AAAACAAGCTGTGCTTAACAAAATCTACCCTGTCATCACAGAGGATCAGCTGCATAAACTTGCTCAGAATATAG |
| | | AGACAAATAAAACCCTGGCGATGGCGATCCGGTTGGGCAAAGTTGTCCATTATTCCCAAGACAACCTGGGTTAT |
| | | GAAGATATAGAACACAGCGATATTGTTAATTCTGATTACTGGGGTAGCGCGGGGCAGACCTTAATTAAACAGAA |
| | | AGAAAGCTTCGCACAACATTGGTTAATTGCTTTATCCGTCGCCAATGGGAGCCTGCGTGGGCTGTTAGATACTCA |
| | | AGATAATGCTGATATCTATCTTAGCCGTGGCATTAACACCGCGCTGGAAGGCATTCCAACGGATTTCGAGGCTC |
| | | GTTTTAAACTGCTGTTTGGTAATCACCATCAGTTGTATCAGGATGATCTTCAGCGGGATGAATTGTTACGACAGT |
| | | TATACGGAACGTTATCTCAGCTGCGTCACGCGTCTTTTCATTTTAAAAGTGAGCAGTCCTTCAATCAGGTGCTGT |
| | | TAAAGAAAGTGACTTTAGACACAACCCTGGATAATAACACCTCGGTTTCTCAGACACTGGCCAAAAACATCAAC |
| | | AATTACATAGACGAACACCTTGCACAGCAGCAAGCGCTCGTTAAAAAAACATTAGAAGCAAGTTTCGTCACAAA |
| | | GTACCTTAATCAGACCCAGTGTGATCAACTCTTATCGTCACTCCAGAACAACCAAGCAATTGCGACTCTTCTGCC |
| | | TAAGTTTAATAAACTTCTGCATCGCGCCGCCACTACCGAACAGTCGATAATTGCTGTGGCCAATCAGGTCGAGCT |
| | | GCAGAATAATCCGAATCAGCAATGCGCCTTTATCTGTCTGAAACAGCTGTATGAACAAGACTTCTGGCGTTGGTT |
| | | ATTAAAACAGAAAAGCAGCACTCTGAACCATCATATTGACCAGGCAAAGATTCGTGCGAACAAGCAGGCCAAC |
| | | AAACTTAATGCCAAAAATACTCTCGAGCATCAAAAAATAATGGCGCGTATGCAACAGTTGCGTGGTATTAATGC |
| | | CCAAGAATCATTGTTAGCTTATTTTAGCTATCTTTCTGCACAAACGGCGTCATTTTTTCAAATTCAGACCAACACT |
| | | TATCAGCATAACGCCCAAGCAGCCTCTGAACATAGCAATTTTATCGAACAGCTGAAACAGGACTTCTTGATTCG |
| | | CGCGTTTAAGCAATATCTTAAAGCAGAGAAGTTTAACTATTTGTTACATCTTGGTACACCCGCTAGTTGCGTGAT |
| | | CGATATTGATAAAATCACGAAAAAAACCCCAGTTAATAATCCTTTACTTTACCTGAGTCTGCATCTCATCCCTAT |
| | | TGAATTCGTCAATCAGCTCTCTCTGCAGATAAAGAAATATACTGTACTCACCGGTTCGGAGAAGTTCGGAAACA |
| | | TCCATAATGATATCAACCTGTATCTGACAATGCACAATGCCATTTTGGATATAAAGTGGCTCGACAATCGTGATG |
| | | AATTAGCCAAGTTTTATGACAATAAAGCGCTGTTTGAACAGGTGTTTAGTCAGGATAATAAGCATTTGATTCCCG |
| | | TCAAAGGTTTGCGCGAAATGTTACGATTTGGCAACCTTAGCGAACTGGGAGTTATATTTGAACGTTCAATCGTTG |
| | | AAGCCAATGAGATTAATTCGCTGCAAGACAAACAGAAAAATATTGCTGCCATTCAGGCTAAGAAAGCAAAAGC |
| | | CCATCAGAAACTGTCACAGCAAAAAGACATTAACAAGCAAGACAAAGCGGATTACAAGAGTGACGTAGATAAA |
| | | GTGTCCGAGTACAACCACCTGAAAAACCAGGTTTATCTTCATAATCACAAACAGACCCATCAGTTGATCATGAC |
| | | GATTAGCGGCCGCTTAGTGGGGTTTTCTCGCCGGTACGAGCGAGATATCTATTTTGTCCTGTTGGCTCTGCTGAC |
| | | ACTGAACAAAGTGAAAACGGACGAACTGTCACAGAATTTCCTGGCGTCTATTCGGTCGGGTCAGATAATTAAGG |
| | | CATCCAATCAACTGGGGGAGCAATACGCAAACATCAAAAGTAAGCTGAACCTGCTTTTTCAGATAGAGAAGCAT |
| | | AGAGAAATCCGGAATCGCTTTGCACATTTTGATGATCTTCGTAAAGCGGAGTCGTTAAACATAACGCAACAGAT |
| | | TAATGAAGCACGGCAGCTCATGAGCTATGATCGTAAGAGTAAAAATTCCGTAGTGAAATCAATACTGAACATTG |
| | | TTAAGAAGGACAACATCTCAATAGATTTTACTATGGACAATCAGCATAATCTTACCTTGAAATCTATCAAAGCG |
| | | GACTCCATTATTCATCTGAAAGATAAAGATATTTCTGAAAAGCCCCAAGGTAAAAAGTACAAGAATGCTGTAAA |
| | | AAAATTATTCGAGAATACTGTGTAA |
| 344 | JW13169 | ATGAATGTTATTGAGAGTTTCTTACCGCTGAACACCAAGGAAAAAATCGATCAGCTTATGGCTATTATTAAAAG |
| | | TGAACCTAAAGCAATGAATCAAAATGCCTGGCACATGATTTTTGGGAACATCGGTAAGAGTAAAATGCAAATGT |
| | | ACTTTATTGAGAAATACCCGCAGTCACTGTTTGCTGCCCCTGGAAATTATATTCCGTCTTGTAATGGTCAGGGTC |
| | | AGGAAGAAAAAAATCCTCAGCAGCCTCAAGTCCAGCAGCACGAACGTCAGACAGATATCCCAGTTCCGCCAAC |
| | | CTCGTTGAAAGACAATCGCTTTTTGTATGCGACGTACATTGAGATGGCGTTTCACAATATGTTTCTGAACATCAA |
| | | GCACATCTATGGTGTAGTGTTCGGAAGAGATATAATGGCTGAAGCCAAAGCCAATTATGAGGCACTTAACCCGG |
| | | AAAAAAAATGGGATGAGGATTTTGCAAATGAATTTCTGGTATGGAAACCAATGTTCGAGGCTTTTAACAATGGA |
| | | AATGTCGAGGAGAAACAGAAAGTGGGTGAAATGTTATCACGTCACTTTCCGCTGTTAGTCCCGTTTACTGATTTT |
| | | ACGAACCATGAGTCCAACTATAAGAATCTCACTATTGTCGGTATTTTACGGCGCCTGTCGCAGGTCCTGCGTGTA |
| | | TTGCGCAATCTTTACTCTCATTATAGAATAGAACTGTTCGAGAACCAGAAAAAAGTATATCTTGACAATGAATAT |
| | | CTTATCATTCGCTGCACCATGAATGCCTATATGGGGGCTCGGCGCGTTATTAAAGATCGTTTTTCATACGATGAA |
| | | AAAGATATGCGTTGCACTGATCAATATCAATTCGTAGATGAACGCGGTCGTCGATTGAAGGAAAAAGTCGAAAT |
| | | CAAAGGATTTCGTTATAAGATTGGGGAAAAAGGAAAAGATTCTAAACTCCATTTCACGCCCTTTGGCTTGGTGG |
| | | CTTTCATATCGCTTTTCTTAGAGAAGAAGTATAGCAAGATTCTGACTGACAAACTTAGACTGATTCCCATACAGG |
| | | ACCAACATATTATTAACGAGATGTTGGCGGTCTATCGGATTCGTTTAAACGCACAGAAGCTGAACATATCTAAA |
| | | GATGCAGACCTTCTCGCCTTAGATATTATTAATGAGCTGCAAAGATGCCCGAAAGATCTGTTTAGCTTACTGAGC |
| | | CCCAGCGATCAGAAAAAATTTCGTCATGAATCGGAAGCCAACGATGAAGTTCTGATGGTTCGTCATTCCGATCG |
| | | ATTTCCATTTCTGGTTATGAAGTATATTGACGACTGTCAGCTGTTTGATAATATACGATTCCAAGTATCTCTCGGG |
| | | AAGTATTTTTACAAGTTTTATGATAAAAATTGTATCGACAGTGAGACCAGAGTTAGAGCACTGAGCAAAAATCT |
| | | TAATGGTTTTGGAAGACTCTCGAAAATAGAAGCAATGCGTGAAGGTTGTTGGGAAGATTCTATCCGCCAATATG |
| | | ATGATATACACAAGAACACCGTGGATGAGAAACCCTATGTCACAGATCATCACGCAAAGTATGTAATCAATGGT |
| | | AATCGGATTGCCATGCGTATAATCCGTGAAGAAGAGAAAGCTTATCTTCCTGAATTAAACGCAGAAGGCGTTCG |
| | | CAATCTTGCACCGACATGCTGGTTAAGCATCTATGACCTGAGCTCTCTGGCATTCTTGTTATACCTTACCAATGG |
| | | TGACTTTGTGGAAGGAATAATCGAGAATACCGTAGAGAATTACCATAAACTCTTCAAAGATATTGAAAATGGCA |
| | | CGATGCTGCCGGTGGCGAATGAAGAGGAGCTGGACAGCCTGTTGTGTCGCAACTATGGGGGAATTAAACAGAA |
| | | AGACATCCCAAAAAATATGTTAGACTACCTGCTGCGGAAAACATCCGATGCTCGCAAGCGTTTCGTGGAATTTT |
| | | CGAAAAGTATCATCGACCGGATGATATCACAGACAGAATATAAGATAGAACAGATCAAACGTCAGGAAGAACA |
| | | ATGTCGCCAGAACAAAATTGGCAAGAAATCCTATGTAATCATTAAAGATGGTAAACTGGCGTCCTTTCTGGCTA |
| | | ATGATATAATGCTGTTCCAGCCAAACGATAGCGAAAACTCCAATAAGCTTACCGGCTTAAACTTTCGCATTTTAC |
| | | AAAGTACACTGGCCACAATGAAAGAATGCGGCATTGATCAATTAAAACGTACGTTAACGTCGGCTCATATTATT |
| | | GGCGAAGCGAATGACGAGTACTGCAATCCTATCGTTATGAAAATGATGCGGAAACGTGTGCCAGAAAATACAC |
| | | GTGACTTTTACAAAAGTTATCTTAAAGCCCGGCTGGAGTATCTTAATGAATGCAAACGCAAAGCGGATTACGAA |
| | | AATCTGTCCTTTCTGCATAGTAACCGTTCAAAGTGGCAAGAACATGATGATGAATTTTGTCGTTTGTTGGCGGGC |
| | | CGCTACCTGCACGATGAAAATGGCGGCACGGAATTTGAAAAATCAATTAACTTGCCCTCTGGTATGTTTGATAA |
| | | GTATATCCGTGAAAAACTGTGCGAAGTTCCGGCGCTGAAAGACATTGCGAACGATGAGACCAAAAACGTTTCAT |
| | | ATTTGATCTACGCATATTTTAAGAACGTTTGTAATGACGATTGCCTGTTCTTTTACGAAGCTGGGCGCTCATACC |
| | | GCTTATTCAAACTCTTAGGCATGAATGGTTCAAAAACTGCGCAGGATATTCGACTTATGCTGAACAGAAAGCAC |
| | | AAAACTTCACTGTACAAGGAAATAGATAAGTATCTCATCAGCATTCCTCTGGCGGAGCGTGAACAAGAGAAAGC |
| | | CCGCTTAATGGGCTTATTAAAAGGGATGAAAAACAGTGAAACAGACTTTAAACGCTTCAAGATACAGGACATTC |
| | | TGCTGTTCCTCATAGCCAAGAAGCTGTTCAAAGACAATGTGCAGGACGATGTTCAGCATACTGCCTTCGAGAGC |
| | | CTCAAACTGAAAAGTCTCAAAGATACCGACGGATTATCTCAGAAGATTCGAATCTCTGTGAAAATTAAGAGCAA |
| | | AAATGGTTATGAAAAGGAGATCAAAAAACCGGAGTTGAAGCTCAAAAATTACGCGGATTTCTATAAACTTCTGA |
| | | ACGACCGGCGTTTACCTGCATTGTTGGATCTTGTCAGAGAACATTCAATCGATTATGATTCTCTGGTGGACGAAT |
| | | TCGGTGGGTACGATAAAGTTCGACCGAATGTTATGAAAGATGTGCTGAAATACGAACGGAAATATTATGATAAC |
| | | CATGCTGACTCCGATGAGTCATTAGACTTCGGCAGCATGTTAGATAACTCCAGTTTTAACGAGGAAGAGAAAGA |
| | | TTTGTTACGAAAAATACGGAATAGTTTTGCCCATAATACCTATCCTAAGTATTATATTGTGAACAAAGCGGGCGA |
| | | TCCACATCTGCCCGAAAAAGCAATCAAATGTTCCGAAAAGTTTTCTAGCGACATTAATAACGAGTAA |
| 345 | JW13170 | ATGGCCTTCGATAAACCACGTCCGAAACGGCGGCAGGCACGCTCCGATTTCTACATAACCGATAAGGCGATAAT |
| | | GGGTGGATATTTTAACCTTGCGCAACTGAACTTTTTCAAGACGTTAATGGAGATCTTCACCAAGGCCGGTATCGA |
| | | TGTTAGTAAGATCAAGCAAGACAATAGTCCAAAGTATCTGATGATCTTGATCAAAAAACTGACCCACGATGATG |
| | | AAAAGATTGATGACAAGAAATGGGCGGACGCCTTAGACCTTAGCAACGAATGTCTGCTCAAACTGCAGCAGTTA |
| | | TTATACAAACACTTCCCTTTCTTAGGCCCAGTCATGGGTGGGGAAGCTAGCTATAACATCTACAAACTCAAAGAT |
| | | GGCCATCCCGAAGTGAAGGTGGCAAATGATGTCATGCGTGGTGTGAAACTTGAGGATTGTTTAGCAGTGGTGAG |
| | | ACATTTTGCATTATGTCTGAACGACTGTCGAAACTTCTACACTCATTTTAACCCGTATAACCCGATTGAAGCGCA |
| | | GAAAGAACAGTATCTGTCCCAGAACAAAGTGGCAGTTTGGCTGGATAAAGTGAAAGATGCTTCCCGTCGCATCA |
| | | TCAAACAAAATAATCAGTTAACGTCTCAGGACATGGAATTTCTGACTGGGATAGACCGTATGAAACCCCAGGAC |
| | | AAGGTTGATGATTTTGGAAATATCATGACCGATCGTCGTGGCCGTCCCATCAAAGAATACGTTGAGTACGAAGA |
| | | CTATTATTTTCGAATTCGCGGCAAAAGATATCTGGTGGATGCGGCCGGCGCAAAACTTGTAGACCAGGAACCTC |
| | | GTAATGCACTGTCTGATTTTGGCGTAGTATTCTTGTGCACGTTATTCTTAGAGTCTGACCAGGCTAGACGAATGT |
| | | TAGATGAGTTACGCCTGTTCGAGACCGGGCCGTACGACGGTAGCCGTGATGGAGATGAATTCAAGAATGACATA |
| | | TTACGGGAGATTCTGCTTTTTTACCGTACGCGTGTACCGAGAGGTAAACGCTTGGATCCTATGGACGATACGACA |
| | | CTCCTGGCAATGGACATGCTCAACGAATTGCGGAAGTGCCCGATGCCTTTATATGATGTTTTAAGTCGGGAAGG |
| | | TCAGGGTTTTTTTGAGGACGAGGTTAAACGCCCTAATGATCTTACCCCCGAAGTTGCCAAAAGATTGCGTAGCTC |
| | | TGATCGCTTCCCGTATCTTGCACTCCGCTACATCGACCTTAATAAGTGTTTTGATAACATCCGTTTTCAGGTCCAG |
| | | CTCGGCAAGTTTCGTTATAAGTTTTATGATAAAACCACTATTGATGGGGAACAGGTGGTTCGCGGCTTGCAGAA |
| | | AGAAGTGAATGCGTACGGTCGCCTGCAGGACGTTGAACATTACCGTCAGGAAAAATATGCTGACATGCTGCAAC |
| | | AGACTGAACTGGTGGAAACAGGAGAGGAAGATATCACAATTGCGAATTTTATTCCGGATACGCCGCAGTCATCC |
| | | AGTTACCTGAGTGATCGTACCGCGAGCTATAACATTCATAACAACAGAATTGGTTTGTTTTGGAATATGCCGGGT |
| | | GAACAGGAAGTTCTCGCGGGGGACGAAAAAATGTATCTTCCTGACCTCAATGTAGATGATAATGGTAAAGCGG |
| | | ATGTATTTCTTCCAGCACCAAAAGCATCTCTGTCCGTACGAGATCTGCCAGCTCTGGTTTTTTATCTTTATCTTCA |
| | | AAATCAACATCCCGATTTGACTCCTGCGGAAGCTATCATTCAGCAGAAATATAATGCCTTAGTGTCGTTCTTCGA |
| | | GGACGTCTCAACCGGCCGGTTATTGCCAGTTAAAGATATAGCTGAGCTCGAGGCTGCCATTGACAAGTATGGCC |
| | | ATCTGACCGTTCATGAAATTCCGGAAAAGTTGCGCGACTATCTTACCGGAGTTGCCGGTACAGAAGATGATGAT |
| | | GATTGTGCAGACCGGCTGGACTGCTATGCAATGGGTATTCTGGAAAAACGCTATCGCCGTGTCGCCGCCCATAT |
| | | TGATCAGCTGAAAGAGGCGCGCAAAATGGTCGGTGATAAGATGAATCGTTATGGAAAAAAATCATATATTGAC |
| | | GTGCGTCCGCGTCGCCTGGCAGAACAGTTAGCCCAATCAATCGTTGATTGGCAGCCGGCCACTGACAACGGCCG |
| | | TCATAAAATGACTGGCAAAAATTTTCAGCGCCTTATTGCCTTTCTGGCGAGATATACTGATGAAGTTCCGGTTCA |
| | | AGAAATTAAAGATCTGATGACAAGAGCACGCCTGCTGGATGGGCCTGTGGCGCACCCGTTCCTTCAGCAGGTTT |
| | | TAGATAAAAACCCACTGAACATTGAGGTACTTTACGACTTGTATTTTAAAGAGGAGAAGTTGCACCTGGAAAAT |
| | | TACCTGGAGATAGAGACCAACAAACAAGGAGAAGAAGTGTTTCGTAAAAAAGCTAGTGTTGATCTTTCACGCAT |
| | | TCCTTTTCTGAACAGCGGTCGTCTGCGTTTTCATAAACGAGATTCTGCCAGTTTTCAGAGACTCGCAGCTAGATA |
| | | TATGCAGGTAGACGGACGACAGTCTACTATATTATTACCCGATGGGTTGTTCACACCACATATACTGTCAGTCCT |
| | | GAAATCGGAATACCGCGACCTTCAGGATCATTTGCAGGATCAAGAGCTCAACCGTAATGCTTCGTATCTTATGTC |
| | | TGTGTATCTTGAATGCGTCTTGCACGATTCGGCCCAGCCATTTTATCTGAGCAATAGCAATGATTCTCCGTTCGC |
| | | CCGTCGATACGATCTGTTTGCAATTTTGCAGAATAAAAAAAAGGGGGCGGAGTTACTCCCCAACCCATTAGCTC |
| | | CGGTAGAAATTAATCGGCGGCTGACTGCAAAAACACCAGATGGCTCTGCTAAACTTATTGAACGTGATATCAAA |
| | | GCGCTGTTAGACGATATGGCGCGCAAAACAGAGGAACGGATCCATGATCTGCAACAAGAATATAGCCGTAAAA |
| | | AAGAAAAGCAAGCGCAAGAAGAACGGGTGAAACTGGAGCGCTGCTTTATGCGCAAAATTGCTGATGTTAAGAA |
| | | ACAGGCCCAAGAGGAACGCATTAACCTGCAGAGACGACTCAAACACAAAATTACTGATGTCAAAAAAAATGAA |
| | | CGGACCATCCGTCGTTACAAGACACAAGATATGGCAGTTTTTTTAATGGCGAAACAGATGCTGGCCAACCAGCT |
| | | GTCCTGGCAGAATCAAGAGGGTGAGGTCCCGTTTAAACTTGCTAATGTGTGTAATGAAGGCTTTTTACGGCAGA |
| | | CGATGAAAGTTAGCTTTCCTTATGAGGTCCCTCTCAAAGAGGACAAGACCAAAAAGGTAACGATAGATATCGTT |
| | | CAAGACAATATGAGTCTCAAAAATTATGGGCTGCTGTACAAGTTATATCACGATGAAAGAGTAGTGACGCTGCT |
| | | GCAAAATATCGTGGATCAACAGCAGATATCATTTGCTGAATTAACAGCAGAACTGTCCTTATATGACCAAAATC |
| | | GGTCAAAGGCTTTCAGTAATTTTCAACAGTTCGAAAAATTAGCGTTCGAAACAAATAAAGAGGCCCTGACCCAT |
| | | CCGGAACACCGGGGATTCTTTCTGGAGAAAGTGAACAAAAAGAATCAGGTCATACGTTACGAGCGCCGTAATA |
| | | ATTTTGACGCTTTGCTGGATCTGTTGGATGCAATTGAAGCCCATCAATTAGACCCTCGTGAACGCCAGTGGCTGA |
| | | CGAGCGTCCGTAACGCATTTTGCCACAATTCGTATTACAAGATAGATATGCAACAAATAGAGAAGAAATTGCCC |
| | | ACGATTATTCAACAGATTGTAGAAATAGTACAGCGAATTACAGATAAAGCCTCGCACCCTTCAAACAGATAA |
| 346 | JW13171 | ATGTCCACGAGTGACTCTTTTTACTCGTTTGGAGTAGATTATACCAAGACCTATGACCAACAGCCGGATTGTCGC |
| | | CGCCACGTATTTGGCGCGTATGCCAACCTTGCGAGACATAATATGACCCTGGTTGTAAACACCATTATGCAAGCT |
| | | ATCGGCATGCCAACCTTTAATGAGAACATTATCTCAGACGCTTTCAATAGCACACACAGAAAAGAGATAGATAA |
| | | ACTGGATAACATTAAAAAAGTCCTCTTGCAGGAGCGCTTGTATCGTCATTTTGCTTTTCTGAAACGGATGAAATT |
| | | AGAAGATAGCAAGAAAAAGACTGTGCAGCTGAACACGTTGTTAGAGACTCTGAGCGATTTTACACGAATGATG |
| | | GCCTATATGCGTAATTTTTACACGCATTATAATCCGTATAATTCGCGGGATGAAAAAGAAAAGCAAGGCGATCT |
| | | CAATAAAAAAATGGGCGAACGGTTACAATTCCTCTTGGAGAATAGCCTTCAGATGTTGAAAGACACAGAAAAG |
| | | TTAGATCACGCCAAAAATGAAGTCTTGTCCTCTCTGCGTGTTCCAGAACGGAAAACTATAAGACCGGGGGATAC |
| | | AGAATACTCAAACATTCACGACCTGTACTTCACGAAAAATAAGCGAAAAGGGATCAAGTACGACAAGGACACG |
| | | AAAGTGTTCACGCAGCAGGTCTATATCCTTAACCCCGCTTATCCAGCCAAAATGACCGATAGTGACGGCTATCT |
| | | GTCTCTTGCTGGTATGGTGCATTTTCTGTGCCTGTTCTTAGAAAAGAAGATCGCGTTCGAACTGATGGACGAAGT |
| | | TGGGTTTACACAGCAATGTCATTTTAACGGTAGAGATGCAGAGCAACAATTGTTATACATTAAAGAGGTGATGT |
| | | GCATGAATCGTGTACGTATGGCGCAGCCTCGTTTAGACTCTGAAATGAGTGACACCGCCTTAGCACTGGATATG |
| | | ATTAATGAATTACGCAAGTGCCCAGAACCTCTGTTCAAAGTGCTGGATAAAGAAGCTAGAAATGAATTCAAAGA |
| | | TGATGCAACTGTTCAGTGGGAAATGGAGCACAATGTTGAAGCGCGTCCAGGGGAAGATGAAGAGAATAACAAT |
| | | AATGAGGATGACATCGAAGAACCCGACGAAACAATTCGTGAGGATAAGGCTGTTCCGCGATCTACGTTTGTACG |
| | | CTGGAATGATCGTTTTCCGCAGATGACGCTGTCCTACATCGATATGCAGAGTGTGCTGCCTACCATACGTTTTCA |
| | | ACTGTACCTGGGTAAGTACAGATTTGCATTTTATGAGCATGATAAAGAATATTCCGTTGATAATGCGGAGCGCTT |
| | | ACGTGTGTTACAAAAAGAGATGCATGGATTTGGACGTCCTCAAGAAGTCAAAGCGAATCTTAAAGATAAGTGG |
| | | AAGGACTACTTTGAACACAAAACAATAGAAAATGGTCTGACAATGAAAGAACCCGATAAAGCAGGTCAGGCCC |
| | | CGTATGTCACGGAACAGAATCCCCAGTACGCAATTGATGAAAAATCTCATTCGATAGGTATTCGTTGGGGTGAG |
| | | TGGAGCTCCGGTCATGGTGGCTCCCATTATGGTGACCTTGACAAACTGAACATGTTCATTCCTTGTCTGCCTAAA |
| | | CCGAAAGCCGATGAAGATAAAGATAAACAGCGTAACCATGCCGAAAAATTATTACCGCCTAAGTGCATGCTGTC |
| | | CCTGTATGAGCTGTCAGGTTTAGTCTTCTATCACTACCTGTTAAAAAAGTGCGGAAAAGAAACCGGACAGGTCG |
| | | AACGTCATATAATTACCTACCACGATAATCTTGTCCGATTTTTGACCGATGTTAAAGAAGGTACTATCATTCCGG |
| | | TTACTGATGTGGATGACCCTAAAGGTTATCTTGAAAAAATGTTGATGGAAAGTTATGCCTTGCGTTTATCTGACA |
| | | TTCCAGAGCGTATAAAGAAGTACCTTCTTAATGAGACGAAAAGTCGCGAATATCGGTTGAAAGAAAGTGCCAA |
| | | AAAGCGGCTGGAGATACGCCTCAAAAAAGTGATGAAAGATCTTGAGAGCCATCAGGCCAAAAAAAAGCGCATT |
| | | GGAACAAAAGAGAACAAGTTTAATCGCAAACGATCAACCATCAAGACAGGGAAACTTGCGAAAGATCTCATTC |
| | | GTGATATAATGGATTGGATGCCTCGCGGCAGTGTAGGGCGTATGAATCTTAGCGGTGAATCTTATATGGCAATC |
| | | CAGGCCGCGTTGACCATGTTAGGACAACAGTTTGATCGTGGCAAGGCTAATGTGGAAATCTATGATCTCGTCGA |
| | | TATTTTGGTGAAAGCCAAACTGATAATGCCAGATAGCGATGTTGAGGGCGCAGATTTTAACCCATCACATTATC |
| | | ATCCGTTTATGGATGATGTTCTGACAGAAGATCGCTGTGGCCCGGAAACTTCCTTAGAAGATGTCTATGAATGGT |
| | | ATCTGGAAGAAGAGATTGCGCATATTAAGCGACTGATTAGCTCAATCAACAAAGTGTCAACAGATAGCCTGCTT |
| | | ATGAAGCAGTATAATCTCATCCCCTTCCTGCACTGTGGACGCGAAAGATGGAATAAGGTTGATGACGAAGCTAT |
| | | TAAAAAGTTGGCTGAGAAATACCTTAACAATCCAATTCAGCTTCCAAACTCGCTGTTTGCGAAACCCATTTTCGA |
| | | ATTACTGAAGGAAGTAGCCCAGGAAAAAAACTATGATCGGTTATCACAAGCTCTCGAGGCAGCTAGCCAGGAT |
| | | GCGAATAACCTCTCAAAAAACACCGCGTATCTCATAGGGTTATATTTTGAGATGGTTGAAGGCGATCACAGCCA |
| | | AGCATTTTACAATTCATGTCCAGCGGACGATGGCACCGTTAGTCCGTATCGTCACGTATATAGAGTGTTCAAAAA |
| | | ACTCTACGGCGAGATCATCGAAAACACTAACCGCACGACATCACCGGCATATTCTAAGAAAGAGATCTCCGATA |
| | | TCTTAGCAGGGCGTGAAGTGAATGGCAAAATTCTGTCGGACCGTATTTCTCGCTATGTCCAGAAAGCCGTCGAT |
| | | GAATTCAAAAAACAGAAGGACGATGACCTTAAACAATATCGTATCGAAATAAAGGATGCCGCCTTCAATGAAA |
| | | ACCGGGTTAAACATCTGAGAAAGAAAGCATACGAAATATTTGAGGAAGTTGATGTTAAAGTTGACCAAAAACG |
| | | GGAAGAATTTGAGCGGTTAACCGATCAGTATCGTCAAGAAGTGGAAGCTAAACTGAAAAAACTGTTGAAAAAG |
| | | GTTCAGCTTAATGAGCGCGCAATTTTACGGTTCAAAACTCAGGACATTCTGTTACTGATGATGTCTCGTGACATT |
| | | CTGAAAATGGGGAGTGATAACGAGTTTAAACTGGAAAATGTTTTGTCGGAGTCCTTACTTGAGAAGCGAGTTGA |
| | | CTTTTCGTGGAAAGTAAGCGTGAACGACCAGACTAAAGATAATGTGACCACTTATAAGACGATCGAACAGAAA |
| | | AACATGAAGATGAAAGACTATGGTCAATTTTACAAATTTGCGTCAGATCATCAAAGACTGGAATCTCTTCTGTCC |
| | | CGTTTATCTCCGTCAGTATTCCAGCGCGCAGAAATTGAGAATGAATTCAGTTATTATGACTCAAATAGAAGCGA |
| | | AGTATTCAGACTGGTCTACATCCTGGAGAGTTTTGCTCTGGAGATGAAGCCGGGTCTGAAAGACGACAACAATG |
| | | CGAAAGAACCTTGGTTCAACTACATTCGAAAGGGAAAACCTTCGCCGAAACGGAACTCTTTTATCGAGCTGCTG |
| | | GAAGTGCTCATAGCAGGTGCAGATGGCATTTTAGACAACCAGGAGAAAGAACTGCTCCGCGAGATTCGCAATG |
| | | CGTTTGGACATAATACCTATGACGTGGATTTCGAGACTATCTTTAGCGGGCCGCGCAAAAGTAAACGCAAAGTA |
| | | CCCGAGGTAGCAAATGGTATTAAAGACAATATGGAAGAAAAAACAACGAACGTTTTGGAAAAAACTAAAAAAT |
| | | AA |
| 347 | JW13172 | ATGAAACAGAATGATCGCGAAAAGAATAGCAAAATTAAAAAATCTGCAGCCAAAGCTGTTGGGGTTAAAAGTC |
| | | TGGCACGCTTATCAGATGGCTCGACAGTAGTTTCTTCTTTTGGAAAAGGTGCCGCAGCGGAGTTAGAATCTTTGA |
| | | TAACCGGTGGGGAGATTCGTAAACTTTCCGACAAAGCGATCTTAGAAATTACTGATGACACACAGAACAAAAAT |
| | | GTGTATAACGTGAAGAGTTCCCGAATTCCGAATCTTACGGCGCGCACCGATAAACTGAGTGATAAAAGTGGAAT |
| | | GGATGACCTTGGTTTTAAACGTGAACTTGAACTCGAAGTCTTTGGTCAATCATTTGATGATTCGATTCATATACA |
| | | AATTGCCCATGCCGTTTTTGACATCCAAAAAAGCTTAGCAGCGGTGATTCCAAACGTGCTGTATACCCTCAACAA |
| | | TCTTGATCGGTCATATTCTACGGACGATACGAATGGGAAAAAGGATATCATTGGCAATACACTTAACTATCAGC |
| | | ACTCCTACGATAATTTCGATAAGGAAAAACTGGGTGAGTTCAAAGAATATTATAATGCCGCAAAGGATCGCTTT |
| | | AGTTATTTTCCAGATATATTATGTGTTCTGGAGAAAGTTAATGGCAAAGATCGTTATCAGCCCAAAAGTGAAGA |
| | | AGATGCCTTTAACGTCTTATCCTCTGTTAATATGCTGAGAAACTCATTATTTCATTTTGCACAGAAATCAAACGA |
| | | TGGTAAAGCTCGTATAGCTGTCTTTAAAAATCAGTTTGATAGCGGCTTTAGCCATATTACCAGCACAGTTAATAA |
| | | AATCTATTCGGCTAAAATAGCCGGGGTCAACGAGAACTTCTTAAACAATGAAGGAAACAATCTGTATATCATAC |
| | | TGAATGCCACCAATTGGGACATTAAAAAAATTGTTCCGCAGCTTTATCGTTTCTCCGTGTTAAAGTCGGATAAGA |
| | | ATATGGGTTTTAATATGCGTAAACTTCGGGAATTTGCAGTAGAGTCGAAAAGTATAGACCTGTCCCGCCTGAAC |
| | | GACAAGTTTCTCACCAATAACCGTAAGAAGCTCTACAAAGTCATCGACTTCATCATCTACTACCACCTGAATAA |
| | | AGTGCTGAAAGACTCGTTTGCAGATGGCTTTGTGGCAGCCCTGCGTGCGAGCCAGTCCGAAGAAGAAAAAGAA |
| | | AAACTGTACGCACAGTATTCTGAGCGTCTCTTTGCAGATGAAGGCTTAAAATCTGCCGTAAAAAAAGCTGTGGA |
| | | CATGATGTCAGACACTAAGTTTAGCATTTTTAAAAAGAAGGCCCCACTTGATAAGGCCTTGATTGAGAACATTA |
| | | AGGTGAACTCAGATGCAAGCGACTTCTGCAAACTGATCTACGTTTTCACGCGATTCCTGGACGGAAAAGAGATT |
| | | AATATACTGTTGAACAGCTTAATCAAAAAGTTCCAGGACATACACTCCTTTAATACCACCGTTAAGAAACTCTCC |
| | | GAAAACAATCTGATAATTAACGCGGATTACGTAGATGATTATAGCCTGTTCGAACAAAGTGGTACTGTCGCTAG |
| | | AGAGTTGATGCTGATCAAGAGTATTAGTAAGATGGATTTCGGACTGGACAATATTAACCTGTCTTTTATGTACGA |
| | | CGACGCTTTGCGCACCCTGGGTGTATCAGATGAAAACCTGCCCGAAGTGAAAAGAGAGTACTTTGGTAAGACTA |
| | | AAAACCTTAGCGCATACATCAGAAATAATGTATTGGAGAATCGGCGTTTTAAGTATGTAATTAAGTACATTCAT |
| | | CCGTCTGATGTCCAGAAGATCGCCTGTAATAAAGCTATTGCGGGTTTCGTTCTGAACCGTATGCCTGATACTCAG |
| | | ATAAAACGCTATTATGATTCGTTGATCAATAAAGGGGCGACCGATATGCAAGCTCAGGCGAAAGCGTTATTAGA |
| | | TTGCATTACAGGAATTTCTTTCGACGCCATTAAAGATGATAAACATCTTCATAAGAGTAAAGAAAAAAGTCCTC |
| | | AACGTTCAGCCGACCGCGAGCGGAAAAAGGCAATGCTGACACTGTATTACACAATCGTTTATATCTTCGTGAAA |
| | | CAGATGTTGCATATCAATTCACTCTACACAATTGGCTTTTTCTATCTTGAACGGGATCAACGCTTTATCTATTCTC |
| | | GTGCAAAAAAAGAAAACAAAAATCCCTCGAAAAATTCATACTTGAACGACTTTCGTAGCGTCACGGCGTATTTT |
| | | ATTCCGTCAGAGATTATGGAGCGCATTGAAAAAAATGAAAACAAAGGATTCCTGAAAGAGTTTGAGGAAGCGT |
| | | GGAAAACTTGTGGGGAAACAAGCCGGTTAAGAAAAGAAGATGTTCTGTTGTATGCTCGCTATATCAGCCCAGAC |
| | | CACGCTCTCAAAAATTATAAGACGATCCTGAACAGTTATCGGAATAAGATAGCACACATTAATGTCATAATGTC |
| | | CGCGGGCAAGTATACTGGCAGTATTAAACGAATGGATTCTTATTTCGCTGTGTTTCAGCATCTTGTACAATGTGA |
| | | TATTTTGTCAAATCCTAATAATGCTAACTGCTTCAAAAGCGAATCCCTCAAACCTTTATTACTGGATATGCGATT |
| | | CGACGGCACTGATGAAAAATTATATTCTAAACGTCTGACCAGAGCGTTAAACATACCGTTTGGTTACAATGTGC |
| | | CGCGCTACAAAAACCTGACGTTTGAAAAAATCTATTTGAAGTCGTCAATTAATGAGTAA |
| 348 | JW13173 | ATGGGCAAAAAAAAGCATGATAAACAGGAACCTATTGCGAATCGTCACATTTTAGGCACCTACTTCAATATGGC |
| | | GTTTGAGAACTTCAATAGAACAATGTACATTCTCTGTGAAAAAAAGCTGAAAATTAGCACCTCAGAATATGGCA |
| | | CTCCTGATACTGAACACCTTATCGCAGATCAGCCTATTCAGCTGCGTAAAGCTCTGTTCCGTTATCTTCCGTTTTT |
| | | GGCACCTATTATGGATGATTGGGTAGGATATCAACTCAGAAGTAAAAAATCCAAAGGTAATGGCGGCGACGAG |
| | | AACATTACCCAAAAACAGAAAACAGCCAAACTGGACAGTTCAATTGAAGATATCGTTAGCCAGTTAAACATTTT |
| | | TGCCCAAGAGTTGCGTTACTGTCGAAATAAGTATACCCACAAAAACGCCTATACGTTAGCCTGGGAAGATGAGG |
| | | AGCACCTTCAGAGAGAAAAGCAGATAGCGAAAATGCTTGAAGTGTTAATGAAGGCAGAGCGTGAACTTTTGAA |
| | | AAATCGTAAAGATCGCGAAAAGAAATCGTCGGCGATGGAACTGTTTTTAAAAGACGGGGACCAGTATTACTACC |
| | | GCACAAATAAGGGTAAAACTGTGCGCAACAAACAGTTCTATTTCAATCCCGCCTCATTCGAGCTCACGAAAAAG |
| | | GGGCAGGTTGATTACGACACTATCGCACTGACCGACTTCGGGCGCTTTTATTTTTGCAGCCTGTTTCTTCGGTCA |
| | | CGCGATGCGGAGCGGTTTGCAACGGAAATGAAAATTTTTATTGAGTCTCCATGGCCGGATATTAAAGATAAGGA |
| | | TTCAAATCCAACCACTTATACTCCTAGCCCGGAAAATAAAATTATGCGGGAAGTGATGCAAATGCATCGAATCC |
| | | ATGTACCCCGGGAAAAACGCATCGATGCCGTGCCATCTAAAGGTACTTTGTTAATGGATATACTGGAAGAACTG |
| | | CGGCGCTGTCCGAAAATTTTATTTGATACGTTTTGTCCGACCACGAAAAGCAGTTTCAATCACATAGTAATTCAG |
| | | GATGATGGTACCAAAACATCTACATTAATGGTTAGACATCAGGACCGCTTTGCTCAGTTAGCATTGCGGTATATT |
| | | GATCAAAACGGTTTATTCCCGAATATACGTTTTCAGCTGCGACTGGGCTTATTTCGTTTTAGATTTTATGATAAG |
| | | ACCCTGATTGATGGTACCCCGTGCATCCGTACCGTCCACAAAGAGCTGAACGGTTATGGTCGTCTTCAAGTCGTT |
| | | GAAGAAAAGCGCGTAACTAAGTGGGGAGACCGTTTTCAAAAAGTAACCACAAAAGAAAACGAAGGATATGAG |
| | | ATTGAACAGCTGCAGCCGGATACACCACAAACGGATCCTTATGTTACAGATTGGCGTTCTACGTACAATATTCAT |
| | | ACTGGGCGTATCGGCATGTCTTGGGGCGAAGTGAATGTCGGTGGGAAAACCGAAGCCGGTAGCGCCCTGCTGCC |
| | | GAAAGTTGATCGCAAAAGTAATGGAGACGATTGCTACTATATTCCCGATCTTCCGACTTTGAAGTCGGATGACG |
| | | GGAAAAATAAAGATCGTAAGGTCAACATCCCACAGGACGCGCCACTGTGTACCATGAGCACCTATGACCTTCCG |
| | | GCACTGCTTTTTTATCAATATCTTATCGACAGTTATGGCAGAAAAGGAGCAGATGAGAAAAAACTCCCCACATC |
| | | CGAGAATATAATCCTGGAAAAATGCTATGCCCTCAAAGCGCTGTTCAAAGCCGCAGAAGACAATACCTGTACTC |
| | | CTAAAAGTCTCCGGGAAAAAGAACGGGAATTGGGTCTGAGCGACAACGAGATTCCGAAGAAACTGCTGTCATA |
| | | TCTTGATGGCGAGAAACACAACCCACAGCAAAATCGTAAAAAACATGTAGAGCATGTTTTAAACGGCATAATTA |
| | | ATGACATCAATGGGCGTTTAGAGAGTTTTGAAAACAAAGAGAAGCGAATCAAGGCGGGCGGGCGTAATAATCG |
| | | CTATGGTAATCCACATCATGCCGACGTCCGCCATGGATCCTTAGCGCGCTATCTTATGCGGAGCATGTTACGTTG |
| | | GCAAAGTGTTGACGTTGAATCACCTCATTTTGGTAAGCTGACGTCATTGAACGCACGTACCCTGATGGGGGCTTT |
| | | AGCAGCTTTTGGTAGTGGGGATGAACGCTTACCGTTGAACGAAATTCTCACAGCGGCGAATATGATTGGTGGTA |
| | | ATAATCCACATCCTTTTATCGAGGAAGCCATAAACGGCGCGGACAATATCGAGAAACTGTATGTCGCGTACCTG |
| | | AAAAACGAGAAGAAACATGCAGAAAAAATCTTACGAAATATTGACGAACACTTGCAGTCTTTGCCGCCTTTTTT |
| | | GAGAGCCTCAGATGAGCAAAATCATTGGGGTGTGGATCTTGAGCAGCAAGCATATATTAACAAGTACGCCGCG |
| | | AAACTTAGCGAATTACCTATACAATTGCCAGACGGTTTGTTCACCAAGTACATTGTCGAATTACTGCATAATGCC |
| | | ACTAAAAAATACAGCGAACTGAAAATCATGGATAGCATTGTTGATTCAGATAAAAGAACGACGGATAAAGGCG |
| | | GACATAAAATTGGCGATAATCCGTCCTCTTCCGCTAGTCATATAATTGCGTGCTATTTCGAGAAAGTGTTAGGAG |
| | | ACAAAAGTCAGAAATTTTACGATAGTCAGACGAAAGACTATAAGCGCTTCTACGAGAATATCTCTAAACTGAAT |
| | | CCCAGACGTGAACGCAATAAAGCACTGATACCCGATTATTTTACAGCTAAAGAGATCCAGGAAAAAATCAAAG |
| | | AAGCTCGAAAAAGTGTAAAAGGGAAAAACGATGACGATGCTACTACTCTGAGAGATAAGCTTAATCAAGTCGA |
| | | AGAAAAAGAACGCGCAATACGGCTGTTCCGGGTGGAAGATATGGTGTTGTTTCTGTCAGCGAAACAAATGCTGA |
| | | TGTCCGTCGTTGGCCGCTCTTTAACAGAAGACGTTAATCAGACAAATGCATTACATGAGTCGAAAGATAATCTTT |
| | | CTCAGCTGCGTATTAAGGCAAAAGAGCTCAAACTGGGCCAATTTGGTTTTGATGAAGATTTTAGATTCTTATCTG |
| | | AAGGAGATAATGAAGAAGAACGTAAAGAGAAAGATCAGACCGAATCGTTGCTGGAGTACATCTATCCTTATAA |
| | | GATACGAAAGGAAGGAAAGCTTGTGGGTACGATCAACATAAAACAGAAGGGACTGTCACTCAAAAATTATGGC |
| | | AACATCTATTCGATTCTCGGTGATGATCGTCTGAAGTCACTGATGGAAGGACTCTTTGAAATCGGTGTATCTGAG |
| | | GTGACCTTTGGCGATATTACATCCGAATTCGCAAACTTTGACCAGCTGCGTTCCACAATTTTAAAACTGTTGCAG |
| | | GACAACATAGAAGAGATTGCTTTCAATCGCAACATATCGGTACTCAACAATCCGCGTAATCGTAACTTCTACTCC |
| | | GTTAAGGATAAAGACGGGAACCAGCTGAAAATCAAGATAACAGACCCAGTTACGAACGAAATTATCGCTCTGT |
| | | CCAAAGATGCTATCCGGAATCAGTTTCCCGAGCTGATTAAAATGTTAGAAGAATATGAAGCGGATCGCGTGAGC |
| | | ATTAATGAACTGCGCAAGGCTGTGGCCCACAACCACTACCCCAAGGACATTTCGAAGTTAAAGCCGACGAAAA |
| | | ACAAAAAGCTCCAGCTGCCGAACATAGCCCACCTTGCCAATGAGAACGCAAAAAAAATTATAGATGCTGCTCA |
| | | GAAAGCGTCTGCTGAGAAAGAAAAGAAGAGCGAGTAA |
| 349 | JW13174 | ATGGCTAATACGCAGTTCAAACTGAAATCTGTTGATTATAGCAAGCCTTACGATGAACAGCCTGAGTGTAAACG |
| | | GCATGTCGTGGGAGCCTATGCAAACCTGGCCCGACATAACATGACCCTGACCGTGAATACTATAATGCAGGCCA |
| | | TAGGCATGGAAATTTTCGATGAAAATAACATCGGTGACGCATTCAATTCCAGTCATCGAAAAAAAATTGACGCC |
| | | CTCGACAATATTCAGAAAGTTAACCTTCAGAAACGTCTGTATCGACACTTTCCGTTTTTTAAACGTATGAAATTA |
| | | GAAGATGAAGACAAGAAGTCTGTCCAATTGACCACTCTCCTCGAGGTCATGAGCGATTTTACCTCTTGTATGGCC |
| | | ATCATCCGGAATTTTTACACCCATTATCATCCGTACAACAGCCCAGATGAAAAAAAACGTCAGCTGGAATTGAA |
| | | AAAGCGTATGGGGAAGAGACTGCAGTTTCTGTACGAAAACACCTCTCAAATGTTTAAAACTACGGAAGCGCTGG |
| | | ATCACGAATCAAATGAAGTATTAAGCGCGTTGCGGATTCCCGAGGATTACATCGAAGAGATACTTCCGGGCGAT |
| | | AAAGAGTATGATAACCTTTTCAACTTGATTAACGACCCTAGAACCTCGAAGTTTAAAAAACAAGGTCTGAAACT |
| | | GAACCAGCAAACCAAAGTGATCACACGTAAAAAAGTTCGTTTTGTGCGTAATCCGGACTATCAAGCTTATATGA |
| | | TGGACGAAACCAACGGAATGTCTGATGTAGCAACTATCTTCTTTCTGTGTCTGTTCTTAGATAAAAAGGTGTCCT |
| | | TTGACATGATGGATGAAGTTGGTTTTACCAAACAGATTAAGTTCAATGGTCCGCAGGCTGACCGCCAGTTACTGT |
| | | ATCTGAAAGAAATCATGTGCATGAATCGAATTAGAATGACGAAAGCGAAACTTGATTCTGAAATGACAGATAC |
| | | GGCTCTCGCGTTAGATATGCTCGGTGAAGTTCGCAAGTGTCCTAAAGCCCTGTATGAAGTTTTAGATAAAGATGC |
| | | CCGTAATGAATTCAAAGATGATGCGACAGTACAGTGGGAAACTGAGCACGGCAAAGAAGCCGTGTCCACTGAA |
| | | GCATTAGCGTCGGAATCAGATGAGGATGAATTAACTGATAAAAATACGCCTCGCTCAACATTTGTTCGGTGGGA |
| | | TGATCGTTTTCCCCAGATGGCGCTTCGGTATATTGATTATCAAGGCCTGTTCAATGACATACGTTTCCAACTGAA |
| | | CTTGGGCAAGTATCGTTTTGCCTTCTACCAACACGATAATAAACAGTCAGTTGATAACGAGGAGCGCTTGCGGA |
| | | TTTTACAGAAAGAACTGCATGGTTTTGGACGTATACAGGAAGTCGAGGAGAAAAAGAATGAAAAATGGAAAGA |
| | | ATTATATGATGAGAAGACGGTGAAAGATGGGCTGACCCAAAAAAAGACAGATGAAGCAGGGCAGGCGCCGTAT |
| | | ATTACAGAGCAATACGCACAATATGCGATCGATGAGAAATCGCATTCTATCGGCCTGCGCTGGGAAGGTTGGAA |
| | | TAAGAAAGACAAAAGTAAAGGTCACTATGGTGATCTTGATAAACTGAAAATGTTCATCCCATACGTACCATCCA |
| | | AACCGAAAGAAGAGGAACGGCAGACTAACCAGGCCGAAGATCTTATGGCCCCGCAAGCAATGTTAAACCTGTA |
| | | TGAGTTACCAGCTATATTGTTTTATCAGTATCTTCTGGATAAGTACAAGAGTGATACTTCCAACGCGGAAAACAT |
| | | TATCAAAACCGCATACAGCAATCTGGTCAGTTTTTTCAACGATGTCGATCAGGGGTTATTGGCTCCCGCCGAGGA |
| | | TGCAGATGAAAATGAACGCATTAGTAAGATATCCAGCTTATTAGAAGGATACCATCTTCAAATGTCAGATATCC |
| | | CGGAGAAGCTGCGCAATTATCTTTGCAATAAAGGGATTGACTATGATTTGAAAATGGAGAAATCAGCAATCGGA |
| | | CGCCTGGAAGAAAAGAAAAAGCACGTCGAAAAAGCACTGTCCTCGTATAAAGACAAAAAGAAGATAATTGGAT |
| | | CCAAAGACAACAAGTTTGACAAAATGAGAGCTTCAATTAAAACCGGTCAGCTGGCCACTTGGCTCATTCGCGAC |
| | | ATCATGGATTGGGTCCCAAATAAAAGTTCTGCTCGTAATCGTTTGACAGGTCAAAATTATACTGCGTTGCAGGCT |
| | | GCGATGGCGTTATTTGGTCAGCAAGCGAATTCAAATAGAAGTTATCTGGAATCATGCTTTCGGAATGCTCACCTT |
| | | CTCCCGCTGGATGGCAAACCGTTTAACAAAAATACACATCATCCGTTTCTCGAAGACGTCCTGCAGGCTATGGA |
| | | AGACGAGACGTTAGAGTCGTTCTATGAGAAATATCTCGAGTTTGAGACCAAGCATATAGCCAAAGTAATCAAGA |
| | | CACTGAAAAACGGCACCGATTTTGACGATTATTATCAAGTTCCTTTTCTGCATTGTGATCGTCAACGCTGGGCGG |
| | | GCCCTGATAAAAATCAGGCAGCCCAATATCTTAAACGCCCACTGCAATTGCCTAATGGCATTTTTACCCAGCCG |
| | | ATCTTTGATCTTCTGTGGAAAATCGATAATCTTGAACTCCATAAAGCATTAGAAGAGTCACAGCAGGCCAATGG |
| | | TGACAATCCGCCCTTAACTGATAACGTGGCTTACCTTATGCGCTTATATTTTGAGTTTGTGGAACATGATCACGC |
| | | GCAGCCCTTTTACTACACCACTACGACGGACGGGAATAAAAGTCATTACCTTCACATCTACCGAATTTTTAAGAA |
| | | ACTCTACGGACAACCCATTCCACATTCGAATAAAACAACTGTGCCTGCATATACAATAGATGAAATTCGTCATCT |
| | | GCGGAAACAAGCTATTGCCGATATTGAAGAATATGTTGACAATGAAATTGAGAAATGGCGCCGTACAAAACAG |
| | | GATCGATTCGAGTCGAAACTTAGAAAAAAATTGAAGAAAGAGAACGACAAGCGGTATAAGAAGCACGAAAAG |
| | | CAGTTAAACATAAACGAAGAGATTCAGAAAGCCGTGAAAAAGGAAACCGATACGATGCGTACAGATATGACAA |
| | | GCAAAATGAAACGTCAGTTGAGAAATGTGTATGACAATGAGAGAACCATACGTCGGTTTAAGGCACAGGACAT |
| | | GATGTTACTCATCATGGCAAGAAATATTCTGAAGGCGAAAAGTAACGATAAAGACTTCACTGATGGCTTTTGCC |
| | | TGGAAAATGTGTTCAGCGACAGCTTACTTGATAAACCAATTGACTTCGAATGGAAAGTTAACATAAAAGGTGCT |
| | | TCTAAGACGATCAAACAGGAAGGTATGAAAATGAAGAATTACGGACAGTTTTACAAGTTTGCTTCAGACCATCA |
| | | GCGACTTGAAAGCCTGTTAAGTCGCCTGCCTGATTCTCTGTTCCTGCGCGCGGAGATTGAGAATGAATTAGCATA |
| | | CTATGACTCTAACCGTAGCAAAGTTTTTCGTCAAGTTTATATCATAGAGAGCGAAGCTTATCGCTTAAAACCGGG |
| | | CTTGCAAGATGACGCAAACGCCAGTAAAGACTGGTTTTACTTCACAGATAAAAAAACACACAAACAGCGCCCC |
| | | ATTAGAAATAGCTTCATTCAGCTGCTGGAAATTCTGGCCGCGGGTGAAGATGGGATTTTAGATAATGACGAGAA |
| | | AGTTGCACTGCAGAAAACCCGCAACGCATTTGGCCATAACACGTATGACGTAGACTTGAATGTAGTATTCAAGG |
| | | GGAAAGAAGACAAAAAAAAGATACCAGAAGTAGCTAATGGAATTAAAGAGAAGATTGAGACGCAGACGGAAG |
| | | AACTCAAGCGCCGTTCCAAATAA |
| 350 | JW13175 | ATGACAGACAACACTAACAAGTATTTTAAGCTTAAAGAGGTGGATCACACACAAACGTATGAAACGCAGACAG |
| | | ATTGTCAACGTCACGTCGTGGGCGTTTACGCCAATATCGCTCGTCATAACATGACACTGGCAGTCAATACTGTTA |
| | | TGCAGAGCCTTGGTGAACCATTATTTGAAGAAAACAGTATAGCAGATGCCTTCAATGATACGCATCGCAAAGAC |
| | | ATTAGAGATTTTGAAAACATTAAGAAACTGGAGCTGCAGGAACGCTTGTACCGTCACTTCCCTTTCTTGAAACGT |
| | | ATGTACAAAGATAAGGAAGTATCTCTGAAAGATCTGATGGAGACGATGAGCTGTTTTACTCAGAGCATGGCTAT |
| | | GGTCCGGAATACATATACTCATTATCGTCCGTTTGAATCTAATGTCGAGGAACAGAACGATCTTAAAACTAAAC |
| | | TTGGACAGTATATGGAAGACCTTTTTCTGGAGTCAAGAAAGGTCTTCAAAAAAGAGGAGCGCCTGGACGCCTCT |
| | | TCCAACGAAGTCTTGGGTAGAGTGTATAAGTCGATTAAAAATGACAAAGGTGAGAAGTATGTTCTCGACTTTAA |
| | | CTACCCAGCGTATATGAAGCAGGGTAAAGAAGGACTCAGCGATGTCGGGTTACTCTACTTTCTGTGCCTGTTCTT |
| | | AGACAAGAAAGCTGCCTTCGACCTTCTCAACCGAACCGGCTTTACGCAGCATGCGAAGAATTATTTTGACGGGA |
| | | ATGAGGAACAGACCCTGTTGTTACTGGAAATGATGTGCATGAATCGGATCCGTATGGTACATAGCCGTATTGAT |
| | | TCTGAAATGTCAAACGAAGCATTAGCGTTAGACATGTTAAACGAACTGCGAAAGTGCCCACGCCCATTATACGA |
| | | GCAATTAGGAAAAGATGATCGTGATTCTTTTAAGGATGTAATGTCAACACAGTGGGAAAACGAATCTCCGGATA |
| | | ATGAAGACGCACCCATTGATGCCGAAGGCAAAAGTATCCCCAAAACTACTATGGTTCGATGGGACGATCGATTT |
| | | GCAACGATGGCCCTCTCCTATATAGATACAATGCAGTGGATGGATGACATTCGTTTCCAGCTCAAACTTGGTAA |
| | | GTATAGATTTGCATTCTACAACCATGACGGAGACCATATAGCTGGAAATCTGTTACGAGTCTTACAGAAAGAAA |
| | | TGCACGGATTTGGTCGTATCCGGGAAGTAGAAAAAGAGATGAATGAAAAATGGGGCGCCCTGTTTGAACAAAA |
| | | ATATGAGGAGAATGGGCTGGAGCGCAAAGATGCAGATCAGGCGGACCAAGCTCCGTATATTACTCGCCAACGT |
| | | CCTCAGTATGCGATAGATGACGAAAGCCATAGTATCGGAATGCGGTGGGATTTCACGCGTCCGAAGTATTGGGA |
| | | TTTTACGAAACCTAGTTACGGGGATCTTGCAAATAAGAAAATGTTTATTCCGCATCTGCCAGGCAATCCGAAAC |
| | | CTGCGGAAGAGGGTAAACATCAGACAAACCAAGCTGAGCGGCTGATTCCGCCGCAGTGTACCATGAGCCTCTAT |
| | | GAACTGCCAGCTTTACTGTTCTATGAATATCTTCGGCGGAAACTTCGCAATGAGACGATGGATTCAGCCGAGCA |
| | | AATTATCAAACGTTATTGTAACTCCTTGAAGTCTTTCTTTGGCGACGTATCTAGAGGTAAAGTGTTTCCGGATGA |
| | | TGAAAACGAGTTGGCCGAAGCTCTGAACAAAGATTATGGGTTGAGATTGTCCGATATACCCGAACGGTTGAAAA |
| | | ATGTGCTCTTAGGCAATAGTTTCGACGGTAATGAGAAGCTGAAGAAGATAGTTAAGACCTTCGTGGAAGAACGT |
| | | AAAAATGAAATTAAAGAGATGAAAAGATGCTTAGACGAGGGTATTAATCATAAACTGGTTAAAACCGGTCAAG |
| | | CGGCACAATGGCTGGCGCGTGACATTATGATATGGGTACCGACACAGACCCGCGAGAAACTGTCGGGGCAAAA |
| | | ATATTCAGCCATTCAGGCCAACCTTGCGATGGTTGGTAACTGGGAAGGGGCTGTGAGTTACGGTGATCTTCGCC |
| | | AGCTGTTCACCGCAGCAGGCATAATTCCAGAATCAAACCTGAAAAACCCTAATCAGCATCATCCTTTCCTGAAA |
| | | GATGTATTAAACGGATTATTAAACGATCGCGAGCATTCGGTTAAAAGTCTGTATCAACGGTATCTTGACGTTGA |
| | | AAGCAGCCACATATCGTCACTCGAGTTAAAATTAGCGAGAAACAAAAATTGCCTGGATTCCTTTCCGTCACTTC |
| | | ACCACAATCGTATGCGTTGGAAACAGCAGGATGCGGCCGCTTTAGCGCAGTCGTACCTTACAGTCAAAAATAAG |
| | | GCAAAAGATAGCGAGATCATTCTTAACAGCGAGAAACCTATACAACTCCCCAAAGGCATGTTCGCTGAACGCAT |
| | | CTTAGCCATGATGAAAGAGTTGGCGAAGAACAATGGCGCCCTGAACGAGGGTTTAGAAAAAATCGAGAAGCAA |
| | | GAGAAGGGGTTAAAAGGTAATACCGCATATCTGATCGGTTTGTATCATACTTTTGCTGAAAATGATGCCTCTCAG |
| | | CCCTACTACAATTATGAACGCGTTGTTGACGAAGGTAAACTTGCAAAAAGTGAACGTAAACGTATGGAACAGAC |
| | | GATTCGTCGCTACAAGACTCAGGATATCTTGCTCTTTTACATGGCTAGAGAAATTCTGGCTTTGCCGGTGGGAAA |
| | | TGACAATCGGCAGCGATTTCTGTTGAAGAACGCCATGAATAATGATCTGCTTAGTTTACCGATCGACTTCTCCTG |
| | | GACCGTTCGCTTAAAAGATGGCTCTGCGAAAACCATTACCCAAAAAGCGATGAAGATGAAAGACTATGGAAAT |
| | | TTCCACAAATTTGCCTCGGATGGTAAACGTCTGGCAAGTCTGCTGGAACAGCAGGCTGAGACCGAATTTGCGCG |
| | | AGCAGATATTGAAGCGGAACTGGCGCGCTATGAACAGAGTCGGGTGGAAGTTTTTAGACAAGTGTATATTCTCG |
| | | AAAGCCATGCCGTAATGAAACTGGGCGTGGCAGATGATTGTGATATCAAAGCTCGCGAAGATTTGTTTTACGAT |
| | | TCCGCAAAAGGCAAACGTTGCAAACTGAATTCCTTTAATCAACTGATGCAGGCACTGGGAATCGGGGAAAAGG |
| | | ACCGCGAATCTCTTACCAAAATTCGCAATGCCTTTGCGCACAATTACTATGTAGATCTGAAAGGCATCGGCTTTT |
| | | GGGGCTCAGTTCCCAAAATTCCTAATGTGGCATCAAAAACAAAAGAATGGATGGTGCGCAAGTGTAATGATCTG |
| | | TATGGTCCACGTTTTGGCGGGTAA |
| 351 | JW13176 | ATGGCCAAAAAAAAGACCGCAAAACAAATCCGCGAAGAACAAAAAGCCGCAAAGATGCAGAAAATTCAGACC |
| | | TTTGTGAAGGCTAAGGAAGCTAAGAAAGAAAATGAAAAAACCGCTTCAGCTGTTAAACTTCCGGTCAAGAAAA |
| | | ATCGTAAAAAATCCCTGGCCAAAGCCTCAGGTTCTAAAGCCGTTCTGATTGTAGGTAACGATATTATTATGACTA |
| | | GTTATGGTGAACGCTGCCTGGCGAATCTGGAACATAAAATTACTCCCGAGCTGAACACCGAAAGCCTGACGGTT |
| | | AACAACGTTCTGAACAACGTCAATGCGAAAGATGGTAAAAACATCTCGTTTACAGGGCGCATATCTGGTTTATC |
| | | CGTCTCTTCAGACAATCCACTGCATTTTCATCAGACTGAAGAACGTAAAGCCCCAAAACCAGGGACTGATCTTTT |
| | | ATGCTTAAAAGACAAACTCGAACAGTGGTATTTTGATAAAACCTTCGACGACAATATACATATACAATTGATCT |
| | | ACCAAATACAGGACATAGAGAAGATTCTTGCGTCACATGTCAACAATATTGTCTTTGCACTGGATAATATTTTAC |
| | | ACGCCACAGAAAGCGAAACAGGCGATTTTCTGGGGATGGGTTATATGCGTGCAACCAATACCTTTGAAGAGTAT |
| | | AGAGACAGTGCGATTAGTAACGTCAAGAAATCGTATGAAACGTTCGAGACATACATCAAAAAGAAGGAGTTAC |
| | | TGTATTTTGGAGAAGCCTTTTATCATGGCAATACGTGTCGGAAACCCGAAGATATCTATCACATTCTTGCAATGG |
| | | TGTCATCCTTGCGCCAGTTTTGTTTTCATAGCACTTTCGATGATAAAAGTAAGAGCATTAAGGGATCTTGGCTGT |
| | | ATCAGCTGGATGAACAGCTCTCAGATGAATTCAAGGAGACCCTGGGTATTTTATGGGCTGAGGCCACCGAGAAA |
| | | CTCGACAGAGACTTTCTTAAAACAAATACGGTGAACCTGCATATCCTGTGTGAGATCTTTGATAAAGAGAAGCA |
| | | GGAAGACATCATCAATGCGTACTACGAGTTTTTGATGAAGAAGTCCTTTAAGAATCTCGGGTTCTCAGTTAAGA |
| | | AACTGCGGGAATGCATGCTCGAGGAAGCAGAGTTAAACGAATTCAAAGAAGATAAGTATAACTCGGTTCGCTC |
| | | GAAACTGTACAAGTTATTCGACTTCATCTTGGTGCATCACTATAAGAATGATAGCTCCCCGGAATCTACAGCTTT |
| | | GAAAAATTTGTTACGGACCTGTCTGACGGATGAGGAGAAAGAAAAAGTGTATGTCCAGACCGCCAAAGAGTTA |
| | | ACCGCGCTTTATTCCTATCATTTTAAAGAAGCTTCTGTATCTGTGAATGCGCGTAATATCAAAGAATATCAGGAA |
| | | AAAGCTCAAGTGTATCACATTTCGATTGCTGATAAAATTAGCTCTACAGGTATAGGGCTGTTTAGTCAGCTCATC |
| | | TACATGCTCACCTTGCTGCTTGATGGGAAAGAAATTAACGATCTTCTCACGACCCTCATCAACAAGTTCGACAAT |
| | | ATAATCGGCTTCTTAGACATACTGGACAAAATGCACCTGGATACTGAGTTCAAAAAAGAGTATCAGTTCTTTAA |
| | | CCAGGAGAATTGCAAGTACACGGCGAAAGAACTTAGAACCATTAATAGCCTGGCACGTATGCAAAAACCAAGC |
| | | GCTAATGCAAAAAAAGTAATGTTTCGTGATGCGCTTAGAATTTTAGGCATGGATAATCGATCAGATGAAGAAAT |
| | | TGATAAAGAATTAGATCGAACAATGCCTGTAGGAGCAGATGGCAAGTTTATTAAAGGCAAACAGGGTTTTCGGA |
| | | ATTTTATTGCCAGTAATGTCATAGAATCATCGCGTTTTCGGTATCTGGTGCGCTACAACAACCCGCATAAAACGC |
| | | GTGAGTTAATTCAGAACCAACATGTTGTGAAGTTCGTGCTGGAAGGAATACCGGACACCCAAATCAAACGGTAT |
| | | TTCGAAGTCTGTAAAGATAAAGATACTCCTGATACATCTTCCAAAAGTGCCCAGATTGACGTTCTGGCAGGTAT |
| | | ATTGACAAACATTGACTACAAGATATTTGAAGACGTTCCTCAAAGCGCAAAAATCAATAAAGACGATGCGTCTC |
| | | GTAATCGTGCTGAAGCGCTGAAAAAACAGCGTTATCAAGCAATTGTTACTCTGTATCTGACGGTGCTTTATCTGG |
| | | TGACGAAAAACCTGGTGTATGTTAACAGTCGATATGTAATGGCCTTTCATTGTTTAGAACGCGATGCGCTGTTAT |
| | | ATGGCGTTGCATTTCCGCCAGTTGAAAAGAAATGGGGTAAAGATTATTCACAGTTGACAGCGTCATTGTTAAAA |
| | | GATGAGACTTACACAACTTATGGCCACCTGAAAAATCAAAAAGGACATCGAAAGTGGCACGTGCTGGTCAGCC |
| | | GCAATCTTGAAAACTCCGACAAAAAAGCTGTTCATTGGTTCAGAAATATTAGCGCACACATCAGCGTAATTCGC |
| | | AACATTAATGAATACATCGGCGAGGTTCAGGAGTTTCACTCTTACTTTGAGCTCTACCATTACCTTGTACAAAAA |
| | | ATGATAGCAAAAAATAATTGGTATGATGCCAAGAGTCAGCCCAAGACGGCCGAATATTTGGAGAATCTTGAAA |
| | | AATACCACACATATAGTAAAGATTTCGTAAAAGCGTATTGCATTCCGTTCGGATACGTAGTGCCGCGTTACAAG |
| | | AACTTGACTATCAATGAGTTATTTGATCGCAACAATCCTTTGCCTGAACCGAAAGAAGATAAAGAAAAAAAAGA |
| | | GGTTTAA |
| 352 | JW13177 | ATGAAAAAGCGCTTGAGTAATCCGCCAGCCCGCCGCCAGGATTCAAATCCCCCTTCTGCCTGTAAACTTTATCTT |
| | | ACAAGCTTTGGCAAAGGAAATGATGCAGTGTTAGAACAGCAAATTGATACAGCTGCAGACTATGCCGTGTCACC |
| | | GATTTCTGCTGAACCATCATTGACGGTGACTGAAGCGGCAGAGGCGCGCGTCAAGTTTGATTCGAAACGACCTA |
| | | ATGTTAAAAAAATCCAGCTCACCGCAGACAATCCTCTCCATCATTCCGCGGGAAATCCGGCGTCAACGCGCCGA |
| | | GACATTCTGGGCTTAAAAAATGCCTTAGAAGAACGGTTTTTTGGCCGCACCTTCGATGATACCATCCATATACAG |
| | | ATCATCTACAATATACTGGACATAGAGAAGATTCTCGCCGTTTATGCAACAATTATATCAGCGGCCCTGAACCAT |
| | | CTGATGGATGAGTCCAGCGATGTGTCTCAGAGTGATGTCATTGGGAATATAGCTACCCAAAACCCTTATGCCATT |
| | | TTTAAAGACCCTCAGTCTAGATATGATTATCGTGATCCGTCACTGACGCCAGATCAACGCAAAGATGCAACCAG |
| | | AATTCGCAAAAAGATTGACGCAAATCGGGCGGCCTTTCAGGCACTGTTAGCGACAGGCCGTCTGGGCTACTTTG |
| | | GGTTTGATTATAAACCGCCGCGTAAAGATGAGAAAGATAAAAAAAAGATTAAAGCAGCAGAAACGCAAGAGA |
| | | AGAGATTGTATCATCTTGTCGCCCTCGCGGGTCAATTACGTCAATGGTCTTTTCATGGTGGTGATAAACCAGAGG |
| | | ACGAACTGTGGCTGTATCAGCTGGATAGCCAGCTGGTTGGCGAGCGCAAAGAGTTCCTGGATACATTGGACTAT |
| | | TATTACGGCGATCGTTTCAGAGAGATCAACGACGAATTCATCGAGCAGAACAAGATCAATTTGGCTATACTCGA |
| | | AGAGTTGTACCCCAAGGAAGACTTTCCCGAGATCGCAGCCCTGTATTATGACTTTATTGTAGTTAAGAGTTACAA |
| | | GAACATGGGATTCTCTATCAAGAAATTACGTGAACAGATGACTACTTTAGAAGGTGCAAGCGTGATAACAGCTC |
| | | AGAATATGGACAGCGTGCGGAGTAAACTTTACAAACTTATCGACTTCAGTTTATTTTACCGCTACTACAAAGATG |
| | | AGGCTCGCCGCCAAAGAGCGGTGAATATACTGCGCGCAAGTACCACAGATGAAGAAAAAGAGGCTTTTTATGC |
| | | TGCTGAAGCCGAATGGAACTGGAACTATTTTCGTGGTCGTTTTACGGATTTTTGCCTGAAAATAGGTGATTGGGT |
| | | AAAGATGGATGTGGATGCAAGCCGTTGGAATGGGATATTAGACCTTGATAGCTATAGACGTACCAGCTCCGCGT |
| | | CTTATTTTTCCAAACTGTTGTACGCTATGTCGTTTTTCCTTGATGGAAAAGAGATCAACATCTTGTTCACCACGCT |
| | | CATAAACAAGTTCGAAAACATTGCGTCTTTTATCACTACGGCCAAAGAACTGAGCATTGATGTCACCTTCCACG |
| | | AAAACTATGCTTTCTTTAATCAGGATTGTGACGGATATGCTCGTGAGATCGATGTTGTGCGAAATATTGCACGGA |
| | | TGAAAAAACCAGTTCCAGGTGCCCGTAAAACCATGTATCGTGATGCCTTAACTGTTTTAGGTATTCCTGAGCACA |
| | | TGCAGGCAGATATGTTTGACGCAGAACTGGAGAAAATGTTAGAAAAACCGAAGGACGAAAAAGGGCGGAAACT |
| | | TAAAGGGAAAAATCCCTTTCGCAATTTCATCGCAAATAACGTTATCGAATCCACTCGTTTTATCTACGTCGTTAA |
| | | GTTCTGCAACCCGGATAAAGTTCGATCCCTGGTAAACAACACAGTTGTGACTAAGTTTGTCCTCGGGCGTATGCC |
| | | AGAAACGCAAATTGACCGTTATTACCAATCTTGCATTGCCAATCCGGATAGCGCTGCCCCGCTGGCTGCGCGTAT |
| | | AGATGCGCTGGCCGATATGATGCGTAATATGAGATTTGAAGATTTTAAAGACGTGCAGCAAAAATCAGGTGATC |
| | | CGATTGAAAATATGAGAAAAGAACGTTTCAAAGCGATTATCCGACTGTATCTGGCAGTAGTCTATCAGCTGGTA |
| | | AAAAACCTTGTGAACGTTAATTCTCGGTACGTTATTGCGTTTCACTGTCTGGAACGTGATTGTCAGATCTACACG |
| | | GGAAAGAGTGTCTCCAAGTCCAAGAAATATTTTACTCTGATTGACGTGTTGCTCGAGGAAGGTGATTCGAGTCG |
| | | CAGCGGATATCTTGCCCGCAATGTACGGATGCGTGAACACATTGCACATGATGTAGATATTGGCAAAAGTCTGA |
| | | TTATCACTACCAAAAGTACCGACTCGGCTACAGGTGAAGTTAAGTATTCAAAACTTCGGATTATAGGGTTCTATC |
| | | GAAATAACATTGCGCACTTGACAGCAGTTAGATCATTTGCTGACTACATTGGTGATATCGCGCGCATTGACTCGT |
| | | ATTTTGGCTTATATCATTATATTGTCCAGCGCTTACTCCAGTCTCGAGATTACACAGCGGAAGCCTTCCCAGATC |
| | | GGATTAATCCTTACTATGCGTCATTGGACAGATATCATACCTACGTAAAAGATTTCGTAAAGGCCCTGAACTCAC |
| | | CCATAGGCTATAATCTTCCTCGGTTCAAAAACCTGAGCATTCAACAGTTATTTGACCGGAATGAACTGCAGCCG |
| | | GAGCCGAAAGATGACAAAGCTGAAGAATCGTAA |
| 353 | JW13178 | ATGGCGAAAAAAAAGCGTATGAGTGCTAAAGAACGTAAACAACAACAAATTAATCTGCGAATTAAAAAAGCCA |
| | | CCGAAGATTCCACCAAAAAAGTTAACACGACGGTCGCTGTAAACAATAAACCGATTTCAAAAGAGATCAAGAA |
| | | ATCGAAAGCAAAACTGGCTGGTGTTAAGTGGGTGATTAAAGCGAATGATGATGTCGCTTATATTAGCTCTTTTG |
| | | GTAAAGGAAACAATAGTGTGCTTGAAAAACGTATTATTGGGGATGTTAGTTCCGATGTGAATAAAGACTCTCAC |
| | | ATGTATGTGAACCCGAAGTATACAAAGAAAAATTATGAAATCAAAAATGGATTTTCCAGCGGAAGTTCTCTGAC |
| | | AACGCATCCAAATAAACCCGATAAAAACTCAGGCATGGACGCTTTATGTCTGAAGACATACTTTGAGAAAGAGA |
| | | TCTTCAAAGACAAGTTTAACGATAATATGCACATCCAGGCAATCTATAACATCTTTGATATTGAAAAAACTTTGG |
| | | CCAAGCACATTACAAATATAATCTATGCGGTTAATTCTCTGGACCGCAGTTATATTCAGTCAGGAAATGATACA |
| | | ATAGGTTTTGGTCTTAACTTTAATATACCGTATGCAGAATATGGCGGCGGTAAAGATAGCAATGGTAAACCCGA |
| | | AAATAAAAGTGCATGGGAGAAACGTGAATCCTTTATTAAGTTTTACAACAATGCTAAAGATCGCTTTGGGTATT |
| | | TTGAATCTGTATTCTACCAAAACGGTAAACAAATTAGCGAGGAGAAATTTTACATCTATCTCAACATTTTAAACT |
| | | TCGTCCGGAATAGTACATTTCATTATAATAATACTTCAAGCCATCTCTACAAAGAGCGGTACTGTAAAATCAATC |
| | | CTAAGAACAATTTGAAAACCGACTTTGAATTTGTAAGTTACCTTAACGAGTTTGTCAAAAATAAGTTCAAGAAT |
| | | GTCAATAAGAACTTCATTAGCAACGAGAAAAACAATCTGTACATAATCCTGAACGCTTATGGGGAAGACATTGA |
| | | GGATGTAGAGGTGGTAAAAAAATATTCCAAAGAACTGTACAAACTGTCAGTTCTGAAAACTAATAAAAACCTG |
| | | GGTGTGAATGTCAAAAAATTACGCGAATCTGCGATTGAATATGGCTATTGTCCGCTGCCTTATGATAAAGAAAA |
| | | GGAAGTGGCCAAACTTTCATCCATTAAGCACAAGCTTTACAAGACGTATGATTTTGTAATAACTCACTATCTTAA |
| | | CAGCAATGATAAACTTCTCCTGGAGATAGTGGAAGCCTTGCGGTTGTCGAAAAATGATGATAAAAAGGAGAAT |
| | | GTGTACAAGATCTACGCCGAAAAAATCTTCAAAGCCGAATACGTTATTAATCCCATTAAAACCATCTCAAATCT |
| | | CTTTGCAGAGAAAGGTGATAAACTGTTCAATGAGAAAGTATCGATTTCTGAGGAATACGTCGAGGATATCCGTA |
| | | TCGACAAGAATATACATAATTTTACAAAGGTAATCTTCTTTCTTACGTGCTTCCTGGACGGGAAGGAAATAAAC |
| | | GATTTGTTAACCAACATCATCAGCAAACTGCAGGTGATAGAAGACCATAATAATGTTATCAAAGCCATAGCCAA |
| | | TAACAATGACGCGGTGTATAAAGACTATTCAGATAAGTATGCGGTTTTCAAAAATTCTGGCAAAATAGCTACCG |
| | | AATTAGAAGCAATTAAGAGTATTGCACGTATGGAGAATAAAATTAACAAAGCCTTTAAAGAACCATTGTTAAAA |
| | | GATGCGATGTTAGCGTTAGGCGTTTCCCCTAATGATCTTGACGAGAAATATGAAAAATATTTTAAAACCGATGTT |
| | | GACGCAGACAAAGATCACCAGAAAGTTTCGACCTTCTTAATGAATAATGTCATTAACAATTCGCGCTTCAAATA |
| | | TGTGGTCAAGTATATTAACCCAGCGGACATAAACAGACTGGCGAAAAACAAACATCTGGTGAAATTCGTTCTCG |
| | | ATCAGATCCCGCATAAACAGATTGATTCGTACTATAACTCAGTGAGTACGGTTGAAGAACCAAGCTATAAAGGC |
| | | AAAATACAGCTGTTAACTAAAAAAATTACCGGCCTGAACTTTTATTCTCTCTTTGAGAATTGTAAAATACCTAAT |
| | | GTGGAAAAGGAGAAAAAGAAAGCCGTGATAACACTGTATTTTACTATCATCTACATCCTGGTAAAAAATTTGGT |
| | | TAACATTAACGGCCTGTACACGTTAGCTTTATATTTTGTTGAAAGAGACGGGTTTTTCTACAAGAAAATCTGCGA |
| | | AAAGAAAGACAAAAAGAAGACAAATAAAGATGTTGATTATCTTCTGTTGCCGGAAATTTTTTCAGGATCTAAGT |
| | | ACCGCGAAGAAACCAAGAACTTGAAGTTACCGAAAGAAAAAGATAGAGAAATTATGAAGAAATATCTCCCTAA |
| | | CGACGAAGATCGCAAAGAGTATAATAAGTTCTTTAAACAGTATCGAAACAACATTGTCCATCTGAATATTATAG |
| | | CAAACCTTAGCAAACTGACTAGCACCATTGATAAGGAAATTAACTCCTATTTCGAAATTTTTCATTACTGCGCAC |
| | | AGCGTGTAATGTTCGATTATTGCAAAAATAATAATAAGGTTGTTTTATAA |
| 354 | JW13179 | ATGGCTTATGATAAACCTCGTCCGAAACGTCGCCAAGCGCGCTCAGATTTCTACATTACAGATAAGGCGATTAT |
| | | GGGCGGCTATTTTAACCTTGCCCAGCTGAACTTCTTTAAGACATTAATGGAGATCTTCACCAAAGCAGGGATCG |
| | | ATGTCTCTAAAATTCGGCAGGATAATTCACCCAAGTATTTGATGATTCTCATAAAGAAATTAAGTCAGGACGAT |
| | | GAAACGATCGATGACAAAAAGTGGGCGGACGCCCTCGACCTTAGTAACGAGTGCTTACTGAAATTACAGCAACT |
| | | GCTGTACAAACATTTCCCATTCTTGGGACCCGTCATGGGTGGCGAAGCTAGTTATAACATCTACAAACTGAAAG |
| | | ATGGGCACCCGGAAGTAAAAGTTGCGAATGACGTGATGCGAGGAGTTAAACTTGAAGATTGTCTGGCGGTGCTG |
| | | CGGCATTTTGCCCTGTGTCTGAACGACTGCAGAAATTTTTACACCCATTTCAATCCATATAACTCGATCGATGCG |
| | | CAAAAAGAGCAGTATTTGTCCCAGAATAAAGTAGCGGTTTGGTTAGATAAGGTGAAAGATGCCTCTCGGCGTAT |
| | | TGTAAAACAGAACAATCAGCTGACCTCGCAAGACATGGAATTTTTGACGGGAATAGATCACATGAAACCACAG |
| | | GACAAAGTTGATGAGTTTGGTAACATAATGACAGACCGTAGAGGACGCCCGTTCAAAGAATTTGTGGAGTATGA |
| | | AGATTACTATTTCCGTATTCGCGGTAAACGGTACCTGGTTGATGCTGCGGGCACAAAACTTGTTGACCAGGAGC |
| | | CCAGAAACGCCCTTTCTGATTTTGGTGTCGTGTTTCTGTGTACCTTATTTTTAGAGAATGACCAGTCACGACGTAT |
| | | GCTGGACGAACTGCGGTTATTTGAAACAGGTCCGTATGATGGGAGCCGGGATGGGGATGAATTCAAAAATGAC |
| | | ATACTGCGAGAGATTCTGCTGTTTTATCGCACGCGCGTTCCGCGGGGCAAACGCCTTGATCCTATGGATGACACT |
| | | ACCTTACTGGCTATGGATATGCTGAACGAGTTGAGAAAGTGTCCTATGCCTCTGTATGATGTTTTAAGCAGAGAA |
| | | GGACAGTCTTTCTTTGAGGATGAGGTGAAACGCCCTAATGATTTTACTCCGGACGTTGCTAAACGCTTACGCTCC |
| | | AGCGACAGATTTCCGTATCTGGCGCTGCGTTATATTGATCTCAATAAGTGCTTCGATAATATCCGTTTTCAGGTT |
| | | CAGCTGGGAAAGTTTAGATATAAGTTTTATGACAAAACCACGATTGATGGTGAACAGGTAGTACGCGGTCTTCA |
| | | GAAAGAAGTTAATGCTTATGGCCGCTTGCAAGATGTAGAGCGTTATCGGCAGGAAAAATATGCCGATATGCTGC |
| | | AACAAACTGAATTAGTAGAAACAGGAGAAGAGGATATAACTATTGCCAATTTTATTCCGGATACTCCACAGAGT |
| | | TCTCCGTATCTGAGTGATCGGACGGCATCGTATAACATCCATAATAATCGCATAGGTCTCTTTTGGAATGTGTTA |
| | | GACGAGCAGGAAGTGCTGACGCGTGAGGAAAAAATGTATCTTCCAGACTTGAAAGTGGATGAAAATGGAAAGG |
| | | CAGATGTATTTCTGCCAGCGCCGAAAGCATCCCTGAGCGTTCGTGACCTTCCTGCCCTGGTCTTTTATCTTTATCT |
| | | GCAGAATCAGCACCCAGATCTGACACCGGCTGAAGCGATTATCCAGCAGAAACATAATGCCTTAGTCCGCTTTT |
| | | TTGAAGATGTTTCGACAGGCCGCCTGCTGCCTGTGAAAGGTATTGCGGAGCTTAAAGCCGTGATTGATCGCTAT |
| | | GAGTATCTTACGATTCACGAAATCCCTGAAAAATTGCGCGATTACCTTGCAGGGGCTGTTGGCACTGAGGATGA |
| | | TGATGATTGCGCCGATCGCTTAGATTGTTATGCGATGGGCATCTTGGAAAAAAGATACCGTCAAGTTCGCGCAC |
| | | GCATTGATCAACTGAAAGAAGCGCGCAAAATGATTGGTGATAAAATGAACCGTTACGGTAAAAAGAGCTATAT |
| | | CGATGTGAAACCTCGGTTGCTGGCTGAACAACTGGCACAGAGTATTGTTGATTGGCAGCCTGCTACAGACAATG |
| | | GGAGACACAAAATGACTGGCAAAAATTTCCAGCGTTTAATAGCTTTCCTCGCGCGGTATACCGACGAAGTACCC |
| | | GGGCACGAGTTAAAAGATCTTATGAGCCGCGCCCGTCTGTTGGACGGCCCAGTTTCCCACCCCTTCCTGCAGCA |
| | | AGTACTGGACAAGAATCCATTGAACATCGAAGTTCTGTATGACCTGTACTTCAAAGAGGAGAAGCTCCATCTCG |
| | | AGAACTATCTGGAAATCGAAACCAATAAACAGGGTGAAGAAGTCTTTCGTAAAAAAGCAAGTGTGGATCTTTCG |
| | | AGAATCCCCTTCCTCAACTCGGGCCGTCTGCGTTTCCATAAACGAGACTCAGCATATTATCAGCGACTGGCTGCA |
| | | CGTTACCTTCAAGTCGATGGTCGGCAGTCCACAATCCTGTTACCTGATGGACTCTTCACCCCGCATATTCTCAGC |
| | | GTGTTGAAGAGCGAATACCATGACCTTCAGGATCATTTGCAGGATCAAGAGTTAAACCAAAATGCAAGCTATCT |
| | | TATGTCTGTTTACTTGGAACATGTTCTGCATGACTCTGCTCAGCCATTTTATCTGTCTAACTCCAATGATTCCCCT |
| | | TTTGCTAGACGTTACGACCTTTTTGCAATCTTGCAAAATAAAAAACGTGGCGTAGAGTTATTACCTTGCCCATTA |
| | | ACGCCAGTGGAGATTAATCGACGACTGACCGGTAAAACCCCGGATGACAATGCGAAAGTGATTGAAAGAGATA |
| | | TCAAAGCCCTCTTGGACGATATGGCACGCAAAACAGAAGAGCGGATTCGCCATCTTCCCCAAGGTTTTTATCGT |
| | | AAAAAAAAGAATCAGTCTCAAGAGGAAATGGCAAAGCTTGAACGTCGATTAAAACATAAAATTATCGACGTCA |
| | | AAAAGAACGAACGTACGATTCGACGGTATAAGACGCAGGATATGGCTATATTTTTAATGGCCAAGCAGATGCTG |
| | | GCAAATCAATTAAGTTGGCAAAACCAAGAAGGGGAAGTGCCGTTCAAACTGGCAAACGTATGTAACGATGGTT |
| | | TTTTGTCACAGACCATGAAAGTCTCCTTTCCGTATGAAGTTCCGCTGAAAGAAGATAAGACCAAGAAGGTTACC |
| | | ATTGACATCGTCCAGGACAATATGAGCTTAAAAAACTACGGGTTACTCTACAAGTTGTACCACGATGAGCGTGT |
| | | CGTCACTCTGTTACAAAATATTGTGGACCAACAGCAGATAAGCTTTGCTGAATTAACGGCAGAATTAAGTTTGT |
| | | ATGACCAGAATCGTTCTAAGGCGTTTTCAAACTTCCAGCAGTTCGAAAAACTGGCGTTTGAAACTTCAAAAGAA |
| | | GCCCTGACTCATCCGGAACACCGGGGCTTTTTCCTTGAAAAAGTGAATAAAAAAAATCAGGTCATTCGTTACGA |
| | | GCGCCGTAACAATTTTGATGCCCTCTTAGATCTGCTGGATGCCATTGAGGCCCATCAATTAGATCCGCGTGAACG |
| | | TCAGTGGCTCACAAGTGTGCGTAACGCATTTTGCCACAATTCATACTACAAGATCGACATGCAACAGATAGAAA |
| | | AGAAGCTCCCCACTATTATACAACAAATAGTAGAAATAGTCCAGCGTATTACCGATAAAGCATCACATCCGTCA |
| | | AACAGATAA |
| 355 | JW13180 | ATGGCGCGCAAACTGTTTTCCAATGAAACCCGGCCGCATCTTGCCGCTTATTTCAATATGGCTTGCCATAATGCG |
| | | TTTGTAGTTTTGAGCAGAATAAGTGAAAAAGCGTCGAAAAGTTGCGACCAGCGGTTAGAGATGAAACTGAGTG |
| | | AGCTGCCCGTCATTTCACTGTTTGATACAAAGAAGCCCGAGGAAAAAGAGTGGATCATGAACCGTTTCGAGAAG |
| | | TCTTTTCCGTTTATTTCCCCAGCAATGAAAATGAATAAAATCAGCGAAGCAGGCTATGATGATCTTCAGTGTTCC |
| | | TCACGGCCGTATGTGCGGACGACGTACGCGATGAAAAAATGCATCGTTGACATTTTCAATATGCTCAATTTCTTT |
| | | AGAGACAAGTATACACACTACGTCTTTAATGATGAGCGAAACGATAACGCGGAATATAGAGATATCCAGAAAC |
| | | GTGTAGTGGAATACCTTGAGGCTTGCTTTACTGCGTCATGCCGCATCGTGAAGGAACGCTTTCTGCTGGATAAAG |
| | | AATTGGAATTCTTAACAAAAGGTCGGTACGAGAGACACGGTGCCAAGTGTGTGGTGAATACACGTAGCCCCTTT |
| | | GCTTTACGGGACGAACAAGGTATGCTCTCAGATATGGGGATACTGTATTTCCTCTGTCTCTTCATTGAGAAGCAG |
| | | TACGTTAGTATGCTGTTCGATCAGTTGGGTTACAAAGGTTATGCCATCTATGAGAACCATTCAGAACTGCGTAGA |
| | | AAGTACATACGTGAGATTTTCAGCGTCTATCGCATTAAACTGCCGCGCGAACGTATTGTTTCTGAAAGCGCTATC |
| | | GAGGCACTGGGTATGGACATGCTGGGGGATCTGAAACGCTGTCCTGAGGTCTTATTCAAAACGATTAGTGCTAA |
| | | TGACCAGGCGAAGTTTAGAATTAAAGCCGAAACATCTGGTGAAGAAACCTTATTCATTCGAAAAGATTCTCGGT |
| | | TTGCACGATTGGCGTTGCAATACATCGACGAAAAGGAGCATTTTAAAAATATACGTTTTCATGTGTCATTGGGCG |
| | | AATATCGTTATAAGTTCTACGAAAAAAGATGTATCGATGGGGATACGCGCGTTCGGATCTTACAGAAAGACCTT |
| | | AATGGCTTTGGCCGCCTTGCCGAGATTGAAAAACTGCGTACCGAGCGGTGGGGGAAATATATTCGTCCTTTTGA |
| | | AAGCATTCGCATAGATGATGTTCATACCCGGCCATATATTACGGATCAACGTGCTAAGTATCTTTTTAACGGTAA |
| | | CCGAATAGGTCTGTGTTTTAACACAAAAGATGCACAGGTCATGTCTGCCGGAGTGTATATGCCAGCAATTGACG |
| | | GCGACAATGCACCTTGCGTCCAGCCGACCTGTTGGCTGAGTGTTTATGAGATTCCCGCCATGATTTTTCACTTGT |
| | | TACTGTGTAAGGAAGATGACGCATTGGAAAATACACGAGGCAGCGATACGGAGTCAATAATCAAAAACTACGT |
| | | GGCGAATTACAAACGTTTCTTTGACGATTGGGCGAAAGGACGGTGGCGTCGGAGCGGGGATGCGGCTAAAGAT |
| | | TTTGCTGACATAGAAACGGAGTATTCGATTAAACAACGTGATCTTCCGCAGAAAGTTTGTGATTATATTACTGGG |
| | | GTAAAAGGAAAACCACTGCAAGAAAAAGCTTCCGCGATCGTCAAAGCGATGCGGGCCGAAAACGAAGAAATG |
| | | ATCCGTCGTTTTGATGAACGCTACGCACGTGCAATTAGCCCGGATAATAAGTTTGGAAAACGTTCTTTTATTGAA |
| | | ATCCAACCTGGACGTCTGGCTGCCTTTTTAGCCGAAGATATAGTTCGCTTTACCCCGTCAGTTGATGGTAAAGAT |
| | | AAACCCACGGGCAAAAATTTTTCGGTTTTACAGTCAGCTATAGCAATCTACTCGTTGCGGAAAGGATATGATAT |
| | | GTTGGATGAGCTGCGTCGAATCTTTCTCTCCGCTGGGATTATTGGACAGAGACAGGGTAAAAACCATCCTTTTCT |
| | | GGACAAGGTGTTAGCGGATGAACCTCAAGACACCATGCAACTGTATCGTGCTTATCTTGTGCAACGTGATGTGT |
| | | ATCTTAGACGTGTTAACGCCACCAAAACCTATACTTCAGCGTATTTTATCCATACAACTCGCGCTAAGTGGGCTA |
| | | AACGCACAGACGAATATTACAACTCTCTGGCAAAGAGATATCTGAGCCAGCCGATAGAACTGCCACGCCGCCTG |
| | | TTTGAAGACGATATTAAACGTCGATTAATCAAGCGTCATCCGGATATGGCAGCATGCTTGCAGCAAGAACGCTG |
| | | CAATGTAGCCTATATGATTAACTGCTATATGCAGCAGGTAGAGCACGACGGCGTTCAGTCTTTTTATGCGATGCC |
| | | TCGTCGCTATAGCTGCTTTGCAGATGATACGTATCGAACTGTCGATGAGATGCAGAGCTACTCCCATATAGACCT |
| | | TCTGTCTCATTATCTTCGCGAGTGTAAAAATAACGCGTCGGAAGAGGCCCCGTACATCGAAGCCGACGCACGTC |
| | | GCCGCTTTCACGCACTGTACAAAAAATATGATGATAATGAACGTGTCATTCGCCGCTATATGGTTCAGGATATTT |
| | | TACTCTTCCTTATGGCCAGAGACTTGCTGATTAAAATAAAGACCGATAAGAAGAGTTTTGAGGAATACAGACTC |
| | | CAGAAAGTTACCCCAGAAGGTGAGGGTATACTGGAATATAAAGTACCGGATTTTGCAGTGACATTAACTTTCGC |
| | | CAACGGCGAGAAACGTACCATCCGCCAACACAATCTCAAAGTAAAAAATTATGGAGATTTCTTCAAGTTCATGT |
| | | ATGATGAACGAGTGAAAACTCTGCTGCCACAGGTTAAAAGTTTGGAAATCGATCGGGAAGTGCTGGAACAAGA |
| | | ACTGCAACACTACGACTCCTCTCGGCCTGACGTCTTCCGCTTAATATTAAAACTTGAGCAGTTCATTGTTGAGCA |
| | | CTTCTCCGAACTCAAACAGCAACGTGTGCAGTTTCGTGACATTTTAGATAAAGTAACTTTAAACACCGCGGACA |
| | | AGGAAGTGCTCCGCCTTTTACGTAATGCCTTTAGTCATAATAAGTACCCACGCCTGAGTCAGATTGAAGAATATG |
| | | CCCTGCCGGGCGTAGCAGTTTCGTTACAGCATATTGCAGAGGAATTAGTAACTAAAGCCGGCAGATAA |
| 356 | JW13 | ATGGCTCATAGACAGCAATGGAATAAAAATAAAGCGTCTGATGGTAAAAAACCGCGAAAAGCTAGCTGGCAGT |
| | 181 | GGAAGCAGTCCATGACGACTGAAATGAAGCCCGTGATGGCGTCTTACCTTAATATGGCCCGCCATAATGTGTAT |
| | | CGTACTTTAATTCATATTTCTACCCAAATGCAAATTGCAGAGCAAGGTGATGAAGATAAACTTGCAAAGTTCGA |
| | | GATATGGAAAAAACTGGAGAAAGCCCCGGCCCCTGAACAGATGAAATTGATAAAGCTGTTGCAGAAACACTTT |
| | | CCTGTTCTCCAAGCATTTTTTAACTACGAGAAGAAAGCCGGCAAGGTAATGGTGGATACTAGCGCGCATGATGT |
| | | CCGTCATTTCTTCGTCAAACAGCTGCTCCCGACACTGTCGCGCATACGTAATGAATATACCCATTACGCAGCGAA |
| | | ACCTCGAACACAAAAAGAGGAAGGTGAATTACGACCATACCTTCGGCAAGCACTGGCCGATAGTGTTCCCGCCG |
| | | TGTTCGATCGGTTTGCGGTTGAAGTCGTAGAAGATAACAAGTGTAAAAAAAAGAAACCGACTCAGCCAAAAGT |
| | | AGTTTCGGAAGCGGTTAAAAAAATTTTTCCAGAACCTTTCGACAAAAAGGGTAATAAAAAGAGTATCTATAACC |
| | | TTGTATCTGGCGACGCCTTTAGTGATCTCGGAATCGTCTTCTTTACATGCTTATTTCTGGAACGGCGTTATACTGC |
| | | GATGTTCCTGGATGCATTGAAACCTTGGCCAGAGTCCTTTAATGAGGTGCAGCGTAAAGCAGTGTTTGAAGTTTT |
| | | TACGTACGATCATATTCGGTTACCGCGTGAGAAGTATGATTCTGTAACCCCGGACTATGCTCTCGGTCTGGAAAT |
| | | GCTGAACGAACTGCAAAAATGTCCTGCTGAACTGTTTGATATCCTGTCCTCAAAAGATCAGGAACGGCTGTCAG |
| | | TGGATATTAAGAGTGATGATCCGGACGTAGTGACGGACGATGGAGTTACCGTCAAAGGCGGAAAAGTTCAGAT |
| | | GAAACGTGTCTCCGACCGCTTCGCACGTATGGCAATGATGTATATTGACCGCACTAATGCATTCAAAAATCTTCG |
| | | TTTTATGGTGCATCTGGGCAATTATCGTTTTAAGTTTTACATGAAACAGTGCGTTGCTGATAAGGAAGCTGATAC |
| | | ACTGCGAACTCTTCAGAAGGAAATCAATGGTTTTGGACGAATAGACGAAATTGAAGCCGCCCGTAGACAGATGT |
| | | ATGCGCCAATGTTTAAAGCGACGGTTAAGAAGGAGAACGCGGCCGGGGTCGAGGTTGAAGAATTACAACCGGA |
| | | TCATGCGGGCATGAAACCCTATATGACGGACACAAAAGCTAACTATGTCTTTGATAATAACCGCATTGGTCTGC |
| | | GTGCTATTGGCGGGGATCGCGAACCACGCCTGTATCTGCCGTCTTTGACGGAAAATGGTGAGCCCATTGATGAT |
| | | GCAAAACAGGTTAAACTTTACACCCCAAATGCTTGGTTGAGCGTATACGAGTTGCCGGGCCTCATATTCTACAA |
| | | ATTATTATGTGACACATATCCCGAGCAAGCAGAGAAGTTAGGCGATGCAGAGGAAGTCATTAAAAGCTACATA |
| | | AACGCTTACAGAAAACTGTTTAAGAATATCAGAGATGACAAGTTCGACGGATGGGATGAGAAACGCTATTCACC |
| | | ACTGACGTTGGAAGATCTTCCCGTCAAAATCAAAACGTATATTCTGAAACCTGAAGCCTCGGTCAATCCGCTCTT |
| | | TGCAAAGAAAGCACAGATAGTGATTAAGGAAATGGTGGAAGCGACAGAAAAAGAGATTGAACGGTTCAATCGC |
| | | AAACTTGATCGGTTAACAGACCGGGAAGTTCGCCCGGATAAAAAAACAGACCTTCGTCCGGGGGCTATTGCAAC |
| | | TCGACTTAGCCGCGATATAATGTATTTTGCACCTAAGAGTGAAGCAAAAGATAAGATGACAAGCGCGAATTTCA |
| | | ATAGTCTGCAGTCCGCGCTGGCGTTGTCGAAGTATTCCGTAAAACGAATGCGTGGTATGGTGGATGAACTCGGG |
| | | CACCCGTTTATTGGCGAAGCATTTGACAATTATGCCGCTACCAACTTTAAGATCTATGATTTTTACAAAATCTAC |
| | | CTTGAGTCCCGGTTAAAGTATTTGAAGTCAAAACAGGGTCTGGGTAAAGCTGAATTGGAGAAGTTACCTTTCCT |
| | | GCACCCGGACCGTGCCAAGTGGCAGAAACGCGATAAAAAAGGAATCCAGGAACTCGCGGGGCGTTATCTTAAA |
| | | ATTGGGGAAGTTGATTTTCCACATGGGTTTGAGTTACCGCGCGGATTGTTCACAGCCAGAGCTGAAGCTATTATG |
| | | AGAGAGGCAGGTGTGTTGACTGAACCGGCTGGTGATCGTAAACCGTCAATGACCAATCTTATCAATCATTACTT |
| | | TGAACACGTTTTAGAAGACGATAACCAGCCCTTTTATTGCTGGTCTAAACACTATGAAGTTTTTGACAGACTCGC |
| | | CGCTAAAAAAGATGACAAACATCCTACCCCACAGTTCTTAAGCCCAACTCAGTTGTGTGAAAAAATGAAAGTTC |
| | | GCAAACGCCTTAGACCATCAAAGTTCATGTTAAACAAGGCCCTGGAATCGGTCAATAACGGCCTGCCTGATGAG |
| | | GAGCATATCAAGGATATCTATGACTATCGTATTACCTCACTGGCCAAAGAACGTCTGAAAAAAGACTATGCCGA |
| | | GTATGATGATAATGAACGCATGCTGCGGAGATTTGCGGTGCAGGATAAACTGATATTTCTGATGGCCAAGGATA |
| | | TCTTGCTGGGTGTTGGGGGAATTAAAAAAGAAGCACTGGGTAAGTTTAAACTGAAAGATGTTATGCCGGGCGCA |
| | | AAAGATAGCATTCTGGAAACCACAGTGCCCTTCATTATCACCTTAACGGTAGGAGACACTATTTTAACCATCCGC |
| | | CAGAAAGAGGAGATTAAAATTAAGCGTTATGGCGAATTCTACCGCTATAACAGTGAACCGCGGCTCAAATCTTT |
| | | ATTACCTTACCTGACTAAAAAAATTGGCGGAAACGCTGATGCCAAACTGGAAATCGACCGTGAGGAGTTAGAA |
| | | GATGAACTGAGCCGTTATGACCTTAAACGGGTGGACGTAATGTCAATGGTACAGACCTTTGAAAAAGGTATTAT |
| | | CAAACAAGCGGGCAAGGCCGGTATAAGAATCGACGATGACACGCTGATCAACTTTAACAACCTGATAACCAAA |
| | | ATTGGGCACGTGCCGTATGAGGGCCAAGGGAAAATCTTGATCAACATACGTAATGGTTTCTGCCACAATGAGTA |
| | | CGCGAAAGACATATCTATACCTGAAGAGACGTCACTCCCCGAAATTGCGGAACAAATTAGTACGCTTTTTGATA |
| | | CCACCCGCAAACGTCCAACCACAAAAGAGTAA |
| 357 | JW13182 | ATGGAAACCACGATTAATAACCGAATCGGAAAAGGTGAATACTATACCGAAGAAAGTAAAGAGTTCTTAGCCG |
| | | CCTACTTCAATCAGGCCATTCACAACGTGTTTATTGTTCTGAATCACATTGCAAAAAGATTTGGCATGGACGAGT |
| | | TATCAAGCGATGAGGAGCTGAAAAACTGGCTGATTGGCAGACAGCGGGAAAAAAAACGTAATGCGATCGATAG |
| | | ACAGCGTTTTCTTGAATTAATCGATCGCCATTTTCCTTTTTTGCGAATTGCGAATGCCGATAAAAAAGATGCAAA |
| | | ACGCGAGAATGATCTTGAAGACAATCTGGCGCTGCTCATAACCTTATTGAACGACCTGACGGAACGTCGTAATA |
| | | AGTACTCACACGCCATAACTCATGCGAGTATTGAAAGTAATGACCGCGAGTTAGTTTGGCGCTTATATTCAATCT |
| | | ACGATGCCAATATTAATTTGGTTAAGCGCGACTATTTTGAGTCAAACGTGCATACGGAAATTAATGAAGATCCG |
| | | TACGAAAAACAAGTCGAGCACCTGCGTCGTTTCTGTATGAATAACGATCGTACAAAAGTCGATGAAAAGGGAA |
| | | AGAAAAAGCCTGCGATGCCGAATCCACGTTTTCGTACGCCCTTTCTTAACGCAGAAACTAACCAGCTGAGTATC |
| | | TACGGCCTGGTGTTCTTCGTATCGCTCTTTCTGGAAAAGAAGTACGCCATCCAGATGCAGAAAAATGTGTATGGC |
| | | CTGAAAGATGCTCGCGACACGAAGTTTAAAATGACCAATGAAGTATTTTGTCGTTCGCGTATCATCATGCCGCG |
| | | AGTGCGCCTGCACTCAGACAAAAGTACCGACGCTCTGGTGCTGGACATGCTGAACGAACTGGCCAAAGCACCA |
| | | GAAGTACTGTTTGATCAATTGACTGATCCGTTCAAGGAGAAGTTCTACATAGAAAGCATCGATTCCTTAGAGGA |
| | | GAGCGACATTATCACCCCGGTGCGCGCTATTCGGAAACAAAACCGGTTTATGTATTTTGCTTTACGATATCTCGA |
| | | CGAGTCTAATGCCTTCAGCAAACTTAGATTCCAGATTGATCTGGGTAATTATCATTACCATCTTTATGAGAGCAA |
| | | AATTAACGATCAGACAGAAAGCAGACACCTTACAAGAAAACTTTTTGGGTTTGGTAAACTTATTGCCTTTGAAC |
| | | AAGAATTTGCGCCCGAGGAATGGAAAATGAAATCAAAAGATCTGGACTATTATGAAGGCGCCACCCAGCCGTTT |
| | | ATTGCTAAAACCTATCCCCACTATCATTTGGAAGAAAACAAGATTGGCATTTTGTTCAATGGACAGGCCGAAGT |
| | | TCAATGGCCGCATCTTGATGTTGAAGAACACGAAAGCTTTCCTAAGTATAAACGACGCGCAAATGAGAAAGCAG |
| | | ATGCGTTTTTAAGTGGGAACGAACTGCTGGCTGCGGCGTTTTGTCATCATTTGTATGCGTCGATTGGTAAACCTA |
| | | ATACCGTGGAAAAAATCATTCGCGATAAGTACCATGCTTTACGGCAGCTGTTTTCAGATTTGAAATCTGGCAATC |
| | | TTCAGAATCTGTTAGGTGACAATACCTCTAATGAGGCGATTTCCCAGCTCCTGTTTGAAAAGTACCGTTTGACAT |
| | | TATCGGAAGTGCCAGTACGCCTGCATGCATTCTTGAGCGGTCAGGAGCAGGCTGATACTAAGGCGATAGCGCGC |
| | | GGGAAACTTGAACTTATGGCCCAGCAGAACAAAAAACGTATAGAGCGGTTCGACGCAATGAAAAAAGCAGTGG |
| | | TTAAAGTCGGAAAGGCTCAGTATCGCACGTTACGTTCTGGTGATATAGGCGATTGGCTGGTCCGCGACTTCATGC |
| | | GGTTCCAGCCGATTGGGTATAAGCGTAACCAAGCTGGCAAACAAGAACCGGATCTGAAAAGCAAAGCGAATCC |
| | | AAAAAAGTATCAATTAATCCAGAAAAGCCTGGCTTTGTATGAGCAAGAAAAAAACAACTTGTTAGGGCTGTTCA |
| | | AATCATGCAATCTTCTGTCTTCGGAGAATGAACATCCGTTTTTAAACGAGGTTGTTCAAAGCATGCCTGCAACTT |
| | | GGCAGGACTTTTATGAGCGTTATCTGCATGCGCGGTCTCGGTTCCTGGAAAAATGTATCGAGAAAGGTATTAAA |
| | | AAGAATTCCTATCAAGCCTGCTATTCTTTTTTGAAGATCAAACCCCAGCTCAAAGATAAGGAAAAATTGTATCA |
| | | AGGATGGGACGCCCAGATGAACCTGCCAACAAACATGTTCATCGATGCGATCCATGATTGGTTTCGTCAAACAC |
| | | ATCATGAATCCTTACGCACATGGTTTACACAGCAGGAAAAACCCCACCAATTGATAGGCCTGATTAGAAAGTAT |
| | | ATCGAACTGGCTCATACAGATCAAATTCAGGGATTCTATGATATGTTTCCTTTACGTTACGACTTTTACAAAAAG |
| | | GAATTTCCGAACGGTTTAGTACTCCACGAGCGCATTAATAAACAGAAACAGATTTGGGAAGCCCAGTTAATTCA |
| | | GACCAAAAAAAGACTCGAGGATGCGGCTTCCAAACTTAAAAAAGTTAAACAGCAGGTCGAGAGCTTGCCGGAT |
| | | CAGGAACTCAGATTCCGCAATGAAACAGAGGCCATGGTTTATTTTACAAAACTGTTTGACTCCTCTATTGTAAAG |
| | | AATGCCATCTTAAAACTTCAGCGTGACCAGAAAGCTTTACGGGTAAACACCATTGGCGAAAAGATTATCAAAAT |
| | | CTACACAGCAAAGTATGATGCAATCCATCAAGAGGTGAGAGACTTTAAAAGTATGTTAACGACTGAAAAAATG |
| | | ATACGGCGAGTTAAAGCGGAAGATTGCGTCACCCTCTTCATGTTAACTGATCTTATGAATCAGTCTCAGATTACC |
| | | ATTGGACAGGAACAACGTACTATTAAACTGTCTGATATTCAGCCAATGGGTGAAACTCAGATTCAAGGTATTTT |
| | | AGATGCAGTCCAGGTACTCGAACAAAAGTTGGATTTTTTTTCCTCAGATGAACAGGGGAAAATCTCCCAAGTAA |
| | | AACTCGGTGAGTGGACGATCTTCTCAACGGATACGAAAGTTAAGAAGCAGGGTAACTTTAAACAACTCCTCAAA |
| | | GATCGACGTTTAAACAATCTGGCACACTATATTCTGCCAGATATAGCCGGTGGGGCTATACGGGTTCGCCGTAA |
| | | TCTGCTGGAAATGGAGCTGGATCAATATGACCGCAATCGTATACCCATCATAAAACTTATGTATGAGCTTGAGT |
| | | ACGCAATATACAAAGTGGACCCATTCTCTGTTGAGTTAAAATATAAGAAATTTTCACAATGTTTACGCGAATAC |
| | | GCGCAGAAGGCAGTGCTGAACGTTGAACAGGTCGAGCATCTGAATGTTTTAATCGCAATTCGGAACGCTATTAT |
| | | GCACAACCAATATCCGAATCGTGATCATCTTAAAGCAATAGTCCCTTTTACTGTAAGTGAATATGCACCTGTCCA |
| | | AGAAGGCCTGACCATAGCTCGTCAGCTGCTGGCCTGCGCACAGGTGTCGGTGAATATAATCCTGAGTACTATAA |
| | | GTAAGTTCGAATAA |
| 358 | JW13183 | ATGAATGAAATTAAACAGCCGAATAATTCAAAGTATGTTTATGCACCGTACCTTACTATGGCTGCCTGTAATATA |
| | | GATGCTGTCTTTTATCACTTGGAAGATATTTTCAACCATAAACAGAACAACGCGATAGAGATTGATGATGGCAT |
| | | AACACAGCTTTACAAATTAAAAATATTCCAGGATCTGGGTATCTCTAATGGAAGCAACGATGAGAATACTCCTG |
| | | TTGATTTTCTGAGAAAAGATGCAATTATCAAACAGATTTGTCGTAACATCCCGTTTTTTAACATCCTGTTCGACTC |
| | | CAAAATCTTTAGCAACAAAAGTTTAGATGAACGCTGTCGCTGCGTAGATCGATATATTCGCGCCCTGTTTGACAT |
| | | GCGCAATTATTATAGCCATGTGCTGCACGAAGAGATCGATATTACTCATCAAATCCCCAACATAGAAAACGACT |
| | | TGAATTACATTTTTGAAGAGAATCGTAATACGGTTAAAAAGCGGTTTGTCTTAAACGACGATGATATTAAACAC |
| | | CTTAAAGTGTTTCATAAAGACAAAAAAGGGAGTAATTCGTACTATAAGTTTCTGGAATCCGGAGACCATTGTGA |
| | | TAAACTCACCGTCAATGGGCTGCTGTTTTTCACGTGCATGTTCCTGGAAAAAAGATACGCGTACGAATTGCTCAA |
| | | GAAACACTACGGGTTTAAAAACTCATCTAGTAAAATGCATAAAGCGACCTTGGAGACCTTTACAGTGACGTGTA |
| | | TTCGCCTGCCTCATAATAAACTTGAAGTTTCGGATTCAAAAGTGACGCTGGGTCTGGATATTGCCAACGAAATTT |
| | | GCAAATGCCCTGACGAAATTTTTTCACTGTTGAGTATTAAAGATCGCAATAAGTTCCGTATTCCTATTGATAAAA |
| | | CTGATCCCGAACAAAATATTAACGAAGATTGCGAAGACAATGATACCCAAACGATTCTGCAAAAACGCTATTCT |
| | | AATCGTTTTCCTTATTTTGCCCTGCGTTATCTTGAATTCATGAATCATCTGCCGGACATCTATTTCCACATTGATA |
| | | TGGGTACATACTTTTATGACTGTTACAAAAAACAGCTTATTGATAACAGTGAAATCAAAGATCGAAGATTATCA |
| | | AAAAACATCCTGTGTTTCGATAAAATGGACAATGCGGTGAAAACCTTTAATGATTCAAAGAATTCAGGCTTATA |
| | | TGCCGCCAAGTACGATGAAAAGAACGAATATCGTAACAACACGTTCCCACACTATCATATCAACAACAATCAGA |
| | | TTGGGATATCCCTGGAAAAGTATATACCTGAACTGCGGGGAAAAGATACCCGCTTACGTAAACCAGATGCGTTA |
| | | TTAAGCATCTACGAGTTACCACTGATTGTCTACCTGTGCCTGAACAATAAAGGTGAGGATGTTACGGAATTGAT |
| | | AAAAAACCATATCAATACTTCTAAACTCTTCTTTGAGTATGTGGCATCGGGCGGCAGATATAGTATCGACAATG |
| | | AGAATATGATTATTTTTAATGCGGGGAATAAGATTAATTCTCATCATTTGCCGGAGTTATTTCGCAAAGATAAAC |
| | | TGAATTATAAAGATCTGGCAAGCAAAGCCCTCAAAAATCAACGTGAGAAAGCTCAGAATATAATAGACCGGTA |
| | | TTACACCACTAAGGATCGCAAAGGAAAGATACTGAAAAACAAACGTAGTTTAAAAACAGGCCATATCGCTGAT |
| | | ATTCTTATGGAAGATCTTATGCGCTTTCAGCCAAGCATCGAATATACAGCAGGAAAAGATAAAGTTTCATCCCC |
| | | AAATTATCAGGCACTGCAGAAAGCATTTGCATATATCGGTTCGCGTTATATGGAAATTCCTAATTTGCTGAGAAA |
| | | AGCACGTTTAACTCATTCTGAAAATAGCCACCCCTTCATAGATAAGTGCATCTCTCCAATGCCGAAGAACATCA |
| | | ACGGTTTCTTCAAGCGTTATTTGGAAGAGAAAATTAAGTACATTGATACAATCGTAGCAAAAGGTGACTTTACC |
| | | AATGCTTACTTTTTACGTGACTATATTAAAAAATATGGCGCTGATCTTGAAACCGAGCGTCGTAATGCGGCGCAT |
| | | AATCTTATAGATAAACCGGCCGATATCCCACGGGGCATTTTTAAAGATCTTTTTTCAACAGAATATGCTTCTCCC |
| | | ACCTATCACATCTACAAAGAATTACTCGAGAATGAGGACGATGTTCAGGATTTTTATCATTTGAAACTCAATTTT |
| | | CCGGAGTACATTAACGACAAGCAAAAGTATAAAGTTTATCAGAAGATTAACTTCATTCGAGCTTGTGACATTGT |
| | | AAGCTTTTACATGATGAAAGATCTGATCGGTATCGATAATAGCAGCGTGAAACTTATGAGCTCTGGCGGCGACA |
| | | AACATATATTAAACTTAAGTCAGAATGTCGATATTCCGGTAATGCTGCTGAGAACGATTGGTAAAGGTAAGAAC |
| | | ACAAAGACTAAAATTAATGAGCAAATCATCTCCGGAAAGATTAAAATAAAGGACTATGGCAAATTCCGACGTTT |
| | | GATATTCGACAAACGGCTCTTTTCATACTCGCTGTATTTTAATAAAAACGAAGAAGGGTCGGAAAAGGATAAGT |
| | | TGATATTTGACGACATTGAGTTTGAATTCACCGAGTATGACAAATCGCGGCTGAAGATATTCGAACTGATCCAC |
| | | AAATTTGAGGAACGGGTTATAATTAAAAATGCCATTGCCTTACCGGTGCCCAGCAATTCCGACGATAAAAAAAA |
| | | CAAGAAATACAGTTACATCAGTTTCCCGGATATCCTGAAAAAATCCGGTCTTAATAAAGAAAATATGGAGCTCC |
| | | TCAAAAATATTCGCAACGCGTTTTCTCATCACGAATATTATGTCGTAAAAGACCTTAACGCGAACAAGCGAGAG |
| | | ATCACCAAGAAGTTATATGACAAGTGTGAAAAGGATATTATTTGCATAACAAATTCCATATAA |
| 359 | JW13184 | ATGCTGATCATAAAACCGTACGGACGCAGCCAGACCCAACATGCTTCGGACTCACAGCGCAATCGCCTGCATCT |
| | | TCCATCAGGGCAGGCCCATGCTGAGGCGGTCGAACAGTTGCAGAATAACCTTGACTTTGTGATGGCTCAGTGGA |
| | | TTAGCGTTATTGATAAAATTATACGCAAACAACCACAGCGTAGCGGAAAGGGCGACAAAAAAATCGCAGCCCC |
| | | ACAGGTTTCTACAACCCAGTTCAATGCCCGCAAAGCCTTAGGCATGGCTGCCCTGCAGTGCATCGAAAAAGAAT |
| | | TTTCTGAGTTAAGCGACCTTCAAAAGAAGCAATGGGGTTGGAAAGTCCATCCCTACGATTGTACTAATCTTGTTG |
| | | AGCCTCAACCGAAAGATCGCATTACTGGCCGTTGGTACAGCCGTTTTGTGGGAGCCATTCATCCGCAAGATATC |
| | | ACGCAACAAACCGTTCCGGCAATTGTGCAGAAAATCCATGATCATCTGTATCAGCAGGCGCTGCGTCCAAATGC |
| | | ATCCACGGCCGTGCATACCCAGGGTCACACTACCCATCAGCTCCATACAATAGCTAGAAACGTGCATGCTTTAA |
| | | AAACGCCGAAAGCGTCTACCCACGTGAGTTCAGATTCGGCATGGCAGAGTTATTTCCTGTCTAATGATGTAGTG |
| | | GCCTGCATCTACAAAGAGCTTCAGGACAAGCATGATCAGAAGGACAAGACGAAACATCAGAGCCAGCCTAAAC |
| | | CGCTGATTCCGACAACGACTCCAAAAGCCCCGTTATTTTCCGACCGGGCGACTATTGCCCAGCATCTGTTTAACC |
| | | ACTATGCCAAAGTGTTCGCAACACCTAGTGGGACCCCTACTCCAGTGAAAGATCTTTTAAACGAAGCGCATCCA |
| | | TTGCATGCACAATGGCTGGTGCATCAGTGCATTAAAGCCACCTATAAGGCATTGTTTGATAATGCGTCAATCAA |
| | | AGGCCTGAAGCACATACAACATAAGCTCCCAGCCAATTCTGAAGCCATGAGACAGCTTATTGAAAACCGTCGTA |
| | | AAAATCATGATATTGGACACCTGGTACGACTCGGGAAAGTACTGCATTATGAAGCTGCCGAACGTGGACAACTC |
| | | CCGCGGGCTTGCTGGGGCGAGATTTCTACACCTGCTGTCGCAGAGGGTTCAGCATATTGGCTGTCAGAGGGCCA |
| | | AGCAGAAATCAAACGAAGCGAAGCTTTGGTGCGCAGCTTCAAACAGGCAATCACTCACGCTGGTCATACATTGT |
| | | CCCAGCTGTCAGATTGGTCCGGTAACGGCGATATTTTTCTGAACGCTTCCGAAGCTGCGAAGCAGGCAGATGCA |
| | | AAAACCGTCGAACAGCGTGTAGCCTTATTATTTGGGAGAGCATGTTCAGACCTTTTTCCCTCGTGTTATGCGCCG |
| | | TCTGGGAATCTGCAGGCCGCAATTCAAGCCCTGCTGGCGCAGAGCATCGAAGCCTGGGCTCAGTTACGTCATGC |
| | | CAGTTTTCACTTCAAAGGTAAACACGTGTTCCTCGAAAAACTGCAGAATTCCTTGGCGAAGAACAATGTATCTA |
| | | CCCCGGAATTAGATGCGGTGGCCCAGAAACTGTGGGAACAAGACGGAGAACAGAGACAGAAACGCATACGAG |
| | | CAAGTTTAGAGGCTGCGCATTGTCTGGATCATCTGAGCCAGGCTCAGCTGAACGCAGTTTATCTTTGCATCGCAG |
| | | GCGATAAGCAAACTAGAATCGGTAGTTCGTTAGATATGCCCCGGTTGAACCGCGTTTTAAACCGGGCGCAAAAT |
| | | ACAAAACTTGGTATGAAACCGCTCACCGACGGTGCCCCGACATTACAGTTATCAACGCCTGCTAAGCGCCAAAC |
| | | CCTGGAAAACTCTCCCGCCCAGCGATGTCGGTATGTGCTGCTGAAATTACTGTATGAGCAGGACTTCGCGGCTTG |
| | | GCTCCAGGATACACGCCAGGAAACAATTGATAAGTGGATAGGTGGAGCGATCGCGCGTAACACAAAGGCAGCC |
| | | AGAGAACTGAACGGAAAAGGCTTGCAGCCTCAGACCACCATACACGCTAAGGCGGAACGGCTGTGGCATGAGC |
| | | AAGCGCAGGCACCGACAGCTAAAAGTACATCTCAGGCCAATCCAATTGCTCGGTTTTTTCACGATCTGGCCGCA |
| | | GCAACGGCATCAGAGTTTCGTGTCCAGCGACACTATGCCAGTGACGGTGAACAAGCTCAAGCGCAAGCGGCTTA |
| | | TATTGATGATTTGAAATGCGACGTAGTCGCGCGCGCATTCTTGACGTATCTTAAAAATAAGTGGCCATGGTTGTT |
| | | ACAGGATCTTGCGGTTCAAAATACGCCCTCTTGCATGGATGCACTGCCCGCGGATGCCCATGAAGCCTTGCAGC |
| | | TGGACAATCTTTGGCAACAACGTTTATACTTTTTGTTACACATGGTTCCGGTCGGTGTGGTCTCCCAGCTGTTACA |
| | | TCAACTCCGTAAGTGGCAGGTTCTCTCCACTCAGGCGGAAGCGTCGAAAACTGCCGTTGAAGACCAAGCACTGT |
| | | ACACACATTGTCTGCAGGTAATGGTGCTTTATCTGGATATGCATGATGCTAAGTTCGATGGCGGGACGGCAATA |
| | | CACCTGGACGATACTCATCGCCAGCCCTTAAAAGATTGCTTCAAACGCGTTGAGGATTTTGCCGCGTGTCTCCCT |
| | | GCCTCTGCAAATCCTTCACAACCGGGAGATGCGCACATACCGTTGCGTGGCCTGCGTGAAATGCTGCGCTTTGG |
| | | GGGTGCAAAAGTCTTAGCACCTGTATTTCGTCAACATCCAATTTCGGCGGCTGAATATGCAGACTGGCAAAAAT |
| | | TACAGGCTGTAATTAAAGAGGCCCAAAAAACACGTGAGGATCTTCATGCTGAGTGGGTAAAAAATCGGAAAGG |
| | | CTTTACCGGCCAGCAGGCTTACGCGCAGGCCCTCGAGACGTGTATGTCGCATAGACATCTTGCACATAGAGTCC |
| | | GGTTAGTTGACCATCTGCAACTGCATTCGCTCCTCATGGCCGTCTTGGCGCGGCTGGCAGATTACGCGGGACTGT |
| | | GGGAACGAGACCTTTACTTTGTATCCTTAGCTCTGTGTTATCACGAAGGTCTGGATCCGGCCCAAGTTTTCAATG |
| | | AGAGCGGGAATCACGGTAACTATTTTGATGGTGGTCAGATCGTTGAAGCCTTACGCAACGAATCTAGCCCCAGT |
| | | AAGAGTATTCAAACTCAAGTTGCTATGCTGTTCGGTACTGATTGCAAAAAAGGGGATCCGATGGTCAATATTCG |
| | | TAATGCACTGTCACATTTTAACATGCTGCGTCATACCAAACACCAGACTGCACCTGCGCCAATTGATCTTACGCA |
| | | CTGGGTGAATCAGACCCGCAGACTGTTGGCACACGACCGTAAACTGAAAAACGCAGTTAGTAAGAGCATCATG |
| | | GAGCTTCTGGAGCGTGAAGGCTTAGTTTTGACCTGGCAAACCAATCACCAGCACCAGTTAGAATTGAGCAAGGT |
| | | TGACAGTAAAAAAATTGCGCACCTTGGGGCTAAACAGGGCACGGAACCTCACCATTCCGGCGCGTATTGTGCGA |
| | | TGGTTCGTCAGATATTTTAA |
| 360 | JW13185 | ATGTTAGTGATTAAGCCCTATGGTAGAACCACTACTACGGTTGAATCCAATGCACAGCGTAAACTGAATCGTAA |
| | | ACAAACCCCGTGGCGGGCAGACGACGTTGGCACTTTGAACCAGGAGCATGATTTCCTGATAGCTCACTGGATTT |
| | | CTATGATAGACAAGATTATTTGCAAACCTAAGGCCATCAAAGCAGCAGAGGGCCAAGAACGCAAGCGCTCGCA |
| | | GCCGGGAAAGGCGACAACGCTGCAGAGAGACGTTCGGCAGTTAATAGGTGACGCCGCGCTGGATTTTTTTAATC |
| | | CGAAACCAAATAGAGAAATCTGGCAGTGGAAGCTCCATCCCTATGAGGTTGGTGATGCTCCCACAGGCCAGGCC |
| | | GCTCCTAATATTAAAGGCCGCTTTTACAAAGCTTTTGTCGGCCATGGTGTGGAACCGCACCAAATCGATGCAAC |
| | | GCAGGCGAAAGCAATCACCGAAAAAATACGTGCTCACCTTATGACAGCGGCCTTAAAGCAGCAAGGCAATAAT |
| | | CCCCAGTCAGCGCAAAGCGAGTCGCGTTTAGGTCGTATTGCTCACCAGCTGGGAACCATCACTCAGAACGTTCA |
| | | CCATAAAAAAGATCTTGAACCACATGCGTTGGACGAGGCCGCTTGGCAGACGTATTTTCAGAAAGGGGATGTCA |
| | | TAGAACAAATAGCTAAAGCTCTTGCCGCTAAGTATAATAAAAGTGATAAAAGTAAACAGCCCGCACAGCCAAC |
| | | CCTGACGGATCGAGCTACAATTGCGAAGTTTCTGTTTGAGCATTACGCATTGGTGTTTGGGAAGACTACCCAAGT |
| | | TCGCGATCTCGTTAGAGAAGAACACCCACTCCATAAACAGTGGCAGGTCCACCAGCGTATCAAAGCCACATACA |
| | | AGGCCATGTTTGACAATGCCAGTATGAAAGGGCTGAAAGGGATCCATAAACGTGTTCCGAAAGACAAAAAGGA |
| | | GATGTGGGGCCGCATCCATCAGCGTGCCAATAATCAAAGCGTAGCCCACCTGGTGCGGTTAGGCAAAGTTATTC |
| | | ACTACCAAGCAGCGGAAGAATGTAAAACTGTGCGTGCCGCATGGCATACTTTACAGACAACTCTGGACGCATCC |
| | | CCGTATTGGTTAAGCGACGGCCAAGCCGAGATCAAACGTTCAGAAGCGCTGGTTAGAGTTTTTAAACTTGCGGT |
| | | AAGTCATGCGGGTCGATCCCTGTCGGACCTTACCCAATGGGAAGGTGGAGATATTTTCGATAACGAAGACAAAG |
| | | CCTCAAAAGGAGCCGTCGCGCAGGAATTCGGTGAACGGATGAAAACAATTTTTGGTAACGACAAAGAAAGCGT |
| | | CTTCCCATCTGTTTGGGCCACTGACGATGCATTGAGCGAAGAAGCCAGACAGTTGCTGGAACAAACTATTCAAG |
| | | CTTGGGCGCAGTTACGACATGCCAGCTTCCATTTTAAAGGGCGCGATGGGTTTTTGAACGAACTGAAACGCTCA |
| | | TTATCATCTGAACCGCATACGCTGGCGTACCCGGCGCTTGATCAGTTATCGAAAAAACTGTGGGATGAGGACAT |
| | | TATTACGCGGAAAGAACGCATTAAAAAAACGCTCGAAGCCGCACATTGTGAAACACATCTGGCCCAGCATCAG |
| | | CTGGAAAGTGTTTATAAGACGATTTGTGGAGAAAACGTGACCCGTTATGGATCCACCTTGGATCTTCCGCGTCTC |
| | | AACCGTGTACTGAACCGTGCTCGGAATGCGGACCTTAAAGTCGATACAACCAATGCTCAGGTCAGTCTCCCTAT |
| | | GCCTGCAAAAAACGAAGTACTGGAGAAATCCCCTTCTGCTCGTTGCCAGTACGTGCTCCTCAAAATGCTGTACG |
| | | AGCAAGGTTTCTCGTCTTGGATGCAAGAGAAAAATCTGTACGAGGTGGATAAGTGGATAGTGCGCGCAATTGAG |
| | | CGCTCCAACATCGCGGCTCACGCGATTAATGGATCAAACAAAAACAATAAGCAACCTATTGAAAGCATCCAAGC |
| | | ACGCGCCACGCGTCTGTGGCAGTCAATCGGTCAAAAAACTGGTCACGATTTTTCCAACGATCTGTTGGATGGAA |
| | | AGAGTCCCATTGCTTACTTTTTCCACCAGTTAGCGGCAGCTACTGCTACAGAATTTCGTGTGCAGCGATTTTATG |
| | | AATCAAACGGGGAAGCAGCGCAAGAACAAGCGGCGTTTATTGACGATTTGAAATGCGATGTTGTGGCGATAGC |
| | | ATTTGCTAAGTATCTGGGGTCTAAGTTCAGTTGGCTGTTACAGGGTTTAGACGGTACCCAGACCTGTAGCATCAA |
| | | CGATCTTCAAAAAGCGACTACCACCGCCTCGGTAGAAATATGGCAGCAGCGTCTGTATTATCTTATCCATTTTGT |
| | | ACCGGTAGGCGTTGTGTCACGATTACTGCATCAGCTGCGGAAGTGGCATATATTAACCGCGAAAGGAAAAGATC |
| | | GCGCACCTACACCGGATAATCTTTACGCGCAGTGTGCACAAGTGCTGGTACTGTATTTGGACATGCACGATGCT |
| | | AAGTTCGATGGGGGCACCGCACATCAGCTGGATGATGATCTTCTCAAGAAACTGAAAAGTTGCTTTGAATCCGA |
| | | AGCCGACTTTGCAACGCTCTTTCCGCAAGGTGCAGAGGCCGATTCTCGTATCCCACTGCGTTCATTACGTGAAAT |
| | | GCTGCGGTTCGGCGCTCTGGACACATTGGCGCCACTCTTTGAAAAACATCCTATTACACATGCTGAGTATGAGCG |
| | | ATGGCAGGCATTACAGGGCCAGATTGATGATGCGCAAAATCTTCGGGCCGAGCTGCATAGCCAGTGGGTAGAA |
| | | CACAAACGTAATTTCGATCAGGTACTGCAATATCAGGCCGCCTTAAAGATTTGCGAGGCACATCGGCATTTGGC |
| | | CCATCGCGTCCGTTTAATCGATCATGTTCAGTTACATAATCTTATGATGGCAGTGTTAGCACGCTTAGTTGATTAT |
| | | GCAGGTCTGTGGGAAAGAGATCTGTATTTCGTCACGTTGGCCTTGTGCCACCATCACCAGATCGACCTGAATAGT |
| | | CTGTTCGCCCACACAGATAAACATGGTAACTGCTTCTTTGATAACGGACAGATTGTGAAAGCATTGCGCAAGGC |
| | | TGAGTCTGATGAATGTTTTACGAAAGTACATACCACATTATCTGCGTTATTTGGAGAAACCTATCTGGGCGGCGA |
| | | GTTAAACGGCCTTCGCAACCGCTTCTCTCACTTTAATATGCTGCAGAAGAAAGAGAGCGCGTCAATTAATCTGA |
| | | CCAACGAAGTCAATGAGGCACGAGCCCTGATGGTCTATGATCGGAAACTCAAGAATTCTGTGGCTAAAAGTATC |
| | | TTAGAGTTAATAGAAAGAGAAGGGTTCAAGCTTAGCTGGAAAACAAATAATGAGCATCTTCTGGAAAGAGCGT |
| | | CCATACAAACTAAACGCATTACCCACCTTGGTAATAAAGCCGAGGAAGCTCATCATAGCTCGAATTATTGTACT |
| | | ATGGTTGCACACTTGTTTGGTACGACGTAA |
| 361 | JW13186 | ATGTTAATTATTAAACCTTATGGGAGAACACGTACAGAAGATAATGAGTCAAGCGGACGCCAGCGGAAACTTGT |
| | | AGGTAAACAGATCCAGTTACAAAGTGAGCCAGTTACTGTAATCGCCGAGAAGAATGAATTCCTGATGGCGCAAT |
| | | GGATATCAATCATCGACAAGATCATAAGTAAGAGTCCGGTCAAACGAATTATTGAAGGTAAGATCAAACCATGC |
| | | ATTGCACCTACCCAGCGACAGGCACGCGAACGGATTGGTCAGGCGGCAATCAAGTTTCAGCCCGCCTTAAAGGA |
| | | ACTGGAAGCCAATTGGAAAGCTAAAATCCATGCTTATAAGATAACTCGTACAGTTAGTAGCGGGGATCCCAAAG |
| | | ATCGCATTAAGGGACGATCCTATGCCAAGTTTGTGCCCCATGGAATCGAACCGGAGCAGATAACAACCCAAATT |
| | | GCAGAAGAGATCGCCAAGAAAATTCATGATCATCTTAATCACCACGCGCTGAACTCTAAGGGGACCGGGGGTA |
| | | AAGGAAAAGGATCCATCGCGCACCAACTGGGCAGCATAGCACAAAATGTCCACCAGGCGGATAAAGAAAGCGG |
| | | TCAGGAGCCGTCAGAGGTGGAATGGCAGAAATACTTCGATCATCACGATGTAGTTGCGGCAATTGCTAAAGCTA |
| | | TTCAGAGCAATAGACCGGCACGTACCAAACCTACGTTAACTCCGAAAGAAACTGCTAATACCGGCCAGTCCCCT |
| | | TCTGATTCTCCACGCCGCCTGACAGATACGGCAACGATTGCTAAACATCTTTTCGACCATTTTGGCCAAGTTTTT |
| | | GGTCAGAACGCAAAAGTTAAAGACCTGCTCAAACCGAGCCACCCGCAGCACGGGCTGTGGCAAGTCCATCATC |
| | | GCATCAAAGCAACTTACAAGGCTCTGTTTGACAACGCCTCTGTAAAGCGCCGAAAAAATATGGCGATACACATG |
| | | CCTTTAAACAAAGAAGCCATGATGGCGCTGGTGCGGCATCGCACATCAAATCAGGACCTTAACCAGTTAGTGCG |
| | | TCTCGGTAAAGTGATCCATTACGAAGCTGCGGCATGTGGTCAATCGGTCCGTTCGGCATGGTCTAATATTCGCCC |
| | | TAATATTGACAAAAGTCCTTATTGGCTGTCGGAAGGCCAAAGCGAAATTAAACGGAGTGAAGCCTTGGTTAGAG |
| | | TCTTTAAACTGAGCGTATCTCACGCCTCTAGAACCTTAACGGATCTTTGTCAATGGCAAGAGGGCGATATCTTTC |
| | | TGAACAGCGAGGATGCATCCAAAAAACTGATTCCCGATCGGTTTGTGCAACGTATGCAAACGTTGTTTGGACGA |
| | | GATCAAGACGCGAGTGATCCTGTGATACCATCTGCCTGGCATTCGAATGGGCAACTGCACGACGATGCACAAGC |
| | | CTTGTTAAAAGAGACTATTGATGCATGGGCGCAACTGCGTCACGCTTCGTTTCATTTTAAAGGACGCAACGGCTT |
| | | TTTAACGCAACTGACCCAGGGTTTGAGTCGGCATGCTGGCAGCTCCCCGCCGTCCAAAGTGGCGCTGGACACGA |
| | | GAGCGCGTAAACTTTGGGATCGTGACCATCTTGCGCGTGAGTCTCGTATCCGTTCAACGTTGGTTGGTGCGCACG |
| | | TGGAAACACATCTGAATCCCGTTCAGCTGGAGAAAATCTACACTTGCATTACGGCTAAAGACACCAATCGCTGT |
| | | GGAATTACACTCGATCTTCCTCGTCTGAACCGTGTCTTACAGCGGGCTCATAACACACTCATAGCGCAAGAAAA |
| | | TGATGATCAGATCTTAAAATTGCCACAGCCGGCGAAACGTGAAGCGCTGGAACAGTCTAATGCCGCCCGTTGCC |
| | | AATACATCCTGCTCAAGTTGGTGTATGAGCAGGGCTTCTCGGATTGGTTACACGCCAAAGGCATCAAAGAACTC |
| | | GACAAGTGGGTAAAACTTGCCATTAAACGCACCGATGAAAGTGCCCAGCGTCTGAACACCCCGTATTCGGATGA |
| | | CCTTCCAGTTAAGGCCCGTGCCAATGAGCTTTGGCAGCAGCATGTAAGAACACTGTCAACAAGCGATGCCCTGG |
| | | GCGGTATGTCAGCAATTGCTTATTTTTTTCATCAGCTGTCCGCCGCAACAGCTACCGAATTTCGCGTGCAACGCC |
| | | ATTATGAATCAGATGCGAGTGCCGCTCAGAAACAAGCAGCCTTTATTGAGAAACTGAAATGTGACGTAGTTGCA |
| | | ATTGCATTCAGCAAGTACCTTCAAAAAGATTTCCCTTGGCTGCTGTCAGATCTGGATCCGACGCAAAGTTGTTGT |
| | | GTAAGCGAACTGGCTGTGCATAATAATGCTACCCCAGTAGAACTGTGGCAGCAGCGTTTATATTTTCTGCTGCAT |
| | | TTCGTCCCAGTTGGAGCGGTGTCCCAGTTACAGCATCAATTACGAAAGTGGCACATTTTAAGTCACCATGGTGCC |
| | | GAACATGAATCTTCTTCTCTGGGTCAGCTGTATGCGTCTTGCGCTCAGGTTATGGTACTTTATTTGGACATGCATG |
| | | ATGCGAAGTTTGACGGTGGTATTGCATATCTCCTCTCAGATGAACAGCGTAAACAACTCGAGGATTGCTTCGAG |
| | | TTATCTGAGGACTTTCAGGCATGTTTCCCGAAAGGCTCAGTCCAAGACTCACGGATTCCGCTCCGCGCATTGAGA |
| | | GAAATGTTGCGTTTTGGGGGCATAGAACTCATGAACCCACTGTTCGTTCAGCACAAAATAACTCATACAGAGTT |
| | | TGACCGTTGGACTCAGTTGCAGTCGTGCATTGAGAAATTTCAGAAGTCTAGAGAAGACCTTCATCAAAAATGGA |
| | | TAGATCATCCTGGTGATTTTTCGAAACAGGATAAAGAGGCATACGGCCAGGCCTTAAAAATTTGTGAAGAACAT |
| | | CGACATCTTGCTCATCGCGTCCGGTTGGTTGATCACGTCCAGTTGCATCGGCTGATGATGACTGTTTTAGCTAGA |
| | | TTAACTGATTATGCTGGCTTATGGGAACGAGACCTGTATTTCGTTTGCCTGGCCCTGTGCTACAAGAAAAACATA |
| | | GACCTGACAACGTTGTTCAACCACGAGGACAAGGAAGGCCATAACTTTTTCGATGATGGTCGCATAGTGGAAGC |
| | | GTTACGTAAGGTGAAAAAAGATTTTCAGTTTCCCTTGTTTTCCGAAGATCCAAGCCTGCTGTTGATTTCCGGATC |
| | | AACCAAACTTGCGGGGGAGTTGGTTTTTATTCGCAATCATCTTTCACATTTCGGCATGCTCTCAGACCAGAGCAG |
| | | ATCAAAGAGTACCCAACTTCCCAATCTGACTGACGAAGTCAACAAAACCCGCCAGTTAATGGCGTATGATCGTA |
| | | AGCTGAAAAATGCAGTTTCCAAGAGTGTGATCGAAATCCTTCAGCGGGAAGGGCTGCGATTAGTGTGGCAGATG |
| | | CACGATCACACCTTACAACTCGATCCGAATGAGCCGATACAGACCCAGATGATTAAACATCTGGGTGATCCGTC |
| | | CAGCGAAAGTATGACTGAAAGTATGCACAGCAAAGCATATACCCAGATGGTTGATCAGTTATTCGGGAATAAAC |
| | | AGTTAAACTCGCAGACGTAA |
| 362 | JW13187 | ATGGACCGCAAGTATATGACCCTGGATGATAAGTACTATTTCGCAGCGTACATTAATATGGCCAGACATAATGT |
| | | CTACTTGTTACTGGCAGACATCAGCACTCGCATGGGAGAAAAAGTTCCCAACGACGATGCAAAACTGATATTCC |
| | | CGATATTACAAAAGCTGGAACCGAAGACTACCACAGGAAAAAATAGCGTATCGCCCGACGAGCAGTTAAAAAT |
| | | AATCAAAGAGCTGCACAAACATTTTCCTTTCCTCAAAACGATGCTGTATGCCTATAAGAAACCGATGGGTGCAG |
| | | CAACTGAGGAAGAAATACAGAAAATGGACTACGCTCCGGGCGATTATTATGATCTGTTTACCCTGTTCTTTAAA |
| | | GTGCTTAACGACTACAGAAACGAATTCACACATACGATTTCACAGCCCAATGTTAAAATACTGGGCACCGAGGA |
| | | GTTTCGTGTTAGTTATGTCTTTGATTTTCCTGCGAATTTGTTGTATGGTCTGCGGGTGACATTTGATACTGCAGTA |
| | | CGGAAAGCAAAAACCCGTTTTAATTTTACCCCAGATGATACTAAACACCTTCTGCGTCAGGGCAAAGGTGGCAA |
| | | AGAATTAGTGGGGTTTAAGTATAAGTTTCAGGCGGAAGGTTCCAAGAGTCTTACGATTCATGGTCTGACGTTTTT |
| | | CATTTGCCTGCTGCTGGAACGCAAGTACGCCACGTTGTTCACTCAGAAATTGCAAGGCTTAAAAGACAAACGTT |
| | | CTCGTGGGTTTAAAGCCACCTATGAAGTGTTTGCGGTGCATTGTATACGACTCCCAAATGCACGATATACGTCAG |
| | | ACACCAGTAACGGTGCCCTGTTATTAGATATGTTGAACGAGCTCAAAAAGTGCCCGACACTGCTGTTTCCGCAG |
| | | CTGCCGGCTAAAGGCGAACAGAATAAAGATCAAGATGCGTTTCGTATTAAAGTTGAAGATATGCCTGGCATGGA |
| | | AGAAGAGGGCGATTCTGGTTTTGTTCTCCTGAAGCGCCATGAAGATCGTTTTTCATATCTTGCTCTGCGTTTTATG |
| | | GATGAAGTTAAGTGGTTTAATCTTTTACACTTTCCGGTTGATCTTGGTAATTATCACTATCATCTTTACGATAAAA |
| | | TTGTGGATGGTCTGCCACGCATTGGTTCATTATGGGAAAAAATGATTGGTTATGGCCGTCTCCCTGATTATCAGC |
| | | ATAAGTTTCTGAACAAAGATTATCCAGCTGAGTGGCAACTCCTGTGGCAAAACCATGAATTAAAGAAAGAAAAC |
| | | GAGAATGACAAAAGTTCTTATATGCCGCCCACAATGCCTCACTACCATTTTCCTGATGGGAAAGCGGACAACAT |
| | | AGCAATCAAAATCACAAATCCGGAAACTTTGTTCTGGCCTGCGATACATATTGATGGGAATGATAAAAAAGCCG |
| | | GGAAACCAGCCAAAAAAGAACATCCAGACCTTTTATTAAGTAAGTACGAACTCTTTGCTTTTATTTTCTACGGAC |
| | | TTTTGATTGGGAAAGACCGCATCAAAAAGGAACTCGAGGATAAACTGGTTCAGTACTTCAACAAACGTAAGCAA |
| | | CTGTATCGCAATATTATCAACGGTAAACTTCTGCCATTAGCATTACCTGCTGATATTCCAAAACCTAAAGACAAA |
| | | GGTAAAAAACCGACGGGATATGATCAACGTAAAGAGTTGCTGAACCAGAAATTAGCCATCTATGGATGTACTGC |
| | | CGATGAATTACCAGACGAGATTAAGTGTTTTTTAATGGGTGTGATAACCGAATCATTCGAAATCAAGGCACGCT |
| | | ATCGGTTAGAAGATCTGATCGTAGATACCGAGATTCTCCAGGAGCGCATTAAGCGTCAGCTGAAGGAGAAGCG |
| | | AAAACCTGGAAGCAAAAAAGATGTCGAAATTAAAGCTGGCGTTTTAGCCGGCTTTCTGGCTAAAGATATCATGT |
| | | TGTTCCAGCCCGCTGATAAAACAGAGGGCGTCAAAGCTTCTGGAAAACCAACAAGCACTCTGTACAATGTCTTG |
| | | CAAGCTAAACTGGCGTTGTATGGTGCTAATGTCGATACCTTAGAAAGAACCTTCAATGAGTGTGGTCTGTTATCG |
| | | GGGTCCACGAAACATCCTTTTTTAGGTCAGGTCGTGAGCCGGAAACCGGCGACCATTGTGGATTTTTACATGGCC |
| | | TATCTGACCGCACGGCATAGCTACCTGTTAAAATGTGAGACCGACAAAAATTACCAAGCGTATCAATGGCTCAA |
| | | AAATAACCAGGCGCGCAAAAAAACTGAACCACACTTCGGTCAGCGCTTGGCTGCCGAAATGGAAAAACTGCCT |
| | | GTAGTGATACCACGTGGTTTCTTTGCAGAGTCGATTAAAAACGAACTGTTAGCGCTCAACAACGACAAACTGAA |
| | | TGCGGCAATAGTTTCTGCGCGCACACCCAATACATCCTTTATGTTTATGGCATATCTTAAAGAGTATCTTGATGA |
| | | CGATGTTCAAGATTTTTATGGGTGGCCGCGAGTTTATAAGATTTTCGACAACTTTCACGACAAACGTACCAAAAG |
| | | TGAGATGCGCAAAAGTCTGAAACCGGAACCCTTATCGGAAGAAGCGCGTAAAGGACAGATGGATGAACTTAAA |
| | | AAATGGATTAAGGAAACCCCGAATGACGAGGATTATGGAAAGTTTAAAAAGCGTTATGATGACTTCGAATCAA |
| | | ATGAGAAGCAGATACGACAACTGAAGGTACAGGATATTACAACGTTCGCCATGTGCGATTATTTGCTCAAGAAC |
| | | ATTAACAGAAACCTTATTAACTCCGATGGCCAATTTTATCTGAAAGATATCGCCCCGAAAGGCGACAAAGGCAT |
| | | TCTCGACAAACCCATGAGCGATTTTGGCAGAGTTTTTGATTATTGCTGCACATCTAAAGATTTTGCCGGAGTAGA |
| | | GATTACTATCGAAGGGAAAACACGGATTTTCCAGGACGACCTTAAAGTCAAAAATATTGGGGATTTCAATAAGT |
| | | TCATCAAAGACAGAAGACTGCCGAATCTTCTGGCGTATCTTCAGAAAGAACAGATTCATCGCGCAGAACTGGAA |
| | | AAAGAATTAGAACGGTACGACATTGTGCGGATCGAAATTTTCAAAATTATTCACGAATTTGAAAAGGCCATCCT |
| | | TACGAAGTACCCGGGCATCGATGGGAAGGACTTTGATAATATCATATCTCATTTTCAGCAGTCCAATAATCTTCC |
| | | GGAGCTGACCGCAATGCAAATAAAGAAGATCCGTAATGCTTTTAGCCACAATCAGTATCCTGATCCGATCTACT |
| | | TTCTGAATAACGAGGACTTGAAACTGATCGGTACTACGGGAGTAGAATTGTACACGGATTACTTCTTCAACTTCA |
| | | TCAAGACAATATTAGTGTCAGAGAATTAA |
| 363 | JW13188 | ATGGAAACGCCCGCGACCCCCAATTATAAACGGTTTGATTATGAATCAGATAAAGCATTTTATGCGGCTTTTTTA |
| | | AACACCGCCACACAGAATGTGTTTATCATCTTAAGAGACATTTCGGAAAGCTTAGGTTTGGGGTTTGACCTGTCA |
| | | AACGACGACAATATGCTGAACGTTAACCTTTGGAATATTTTGCAGTCTAACATAGAGCCAGAGTTATCACTGCA |
| | | CATAATTGAGAAAATTGAACGACAGTTTCCTTTTGCGAATTATCTGGCTAAAAATTATGCCTTTTACAAACGCAA |
| | | AGAACGCACTGCGGAACCTAATGATTACTGTAAAGTATTCGAGATGCTGATTGGACAATTGAACTCGTATCGAA |
| | | ATTATTATAGCCATGCAGTGCATGACTATGTACAAATGGATCCAACAATAATTAAGGGTATGCAAGTATTATTTG |
| | | ATGCTGCACGTCGAGAGGTTAAAGTTCGTTTTGCACTTAAGACAAAAGATGTTGATCATCTGGTGCGGTTAAGTT |
| | | CACGCAAAGTTTTTGGCAAAAACGAAGCCTATGAAAAGGAAACTTTTGAATATCGCTTTTTGGATGCGTCGGAA |
| | | TCTATTACTGAAAAGGGCTTTGCATTTTTCATTTGTATGTGGCTCCAGCGCAAGAATGCTCAAGAGATGCTGAAA |
| | | AAAATGACCGGATTTCAGAAATCCGATTCACCGTCCCAAAAGGCTACCTTAGAAACTTTTACTTTTTATTCGGCA |
| | | CGCGTACCGCAACCTAAACTTACCAGTGACAATACAAAGGAAGGGCTGTTGTTAGATATGATAAACGAACTGAA |
| | | GCGTTGCCCGAAAGACCTGTATCCGCTGCTGAGCAATACCGACAGAGAGAAATTCAAATCAATTGAAACGGAC |
| | | AAGGATACCAGCTTTGAAGATGAATATGAAGCTATGCCGATTTTAAAACGGTCTAGTAATCGGTTTAACTATTTC |
| | | GCGCTGAAGTACCTTGATAACTCTTTTGAGAAGATTAAGTTCCAAATCGATCTTGGTAATTATTGCTTTCACGTTT |
| | | ACGATCAACAAATTGACGGCGTTGTTAAAAAACGTCGCTGGATTAAAAAAATGTTAGGGTTTGGTGTGCTGGAA |
| | | GATTTTGCAGATCGTAATAGACCAGACGAATGGAAAGAAAAAATTCAAAAAATTGAAGGGCGTCATCATAAAA |
| | | GTGATGATGTCTATGTAGAGGAAACAACCCCGCACTATCACATTAATGAGCAGAACATCGGCCTGAAGATCTAT |
| | | GACAATTACCTGGAGTCTAAAAAGGAACGAAAAATATGGACGCCACTGCCTGAATTTGCTAAAGAAGATAAAC |
| | | AAAGACATAATGAAACGAAACCTCGCAATGAAAAACCGGATTGTTGGCTCTCACTGTATGAATTACCAGCCATG |
| | | GTTTTTTATCAGATTTTATTCCAGCGTGGTTACTCAGTTCTGTCCGCTGAAAAAATTATCGAAATACACAAGGAA |
| | | CGCATAGAGCGTTTTTTTGAAGATGTGGAAAACTCTAGACTTAACCCGGGAATTACTAATGATGCTTTACTTGCC |
| | | GAACTGGAGCGTCGTAATCTGGAAAAGTCCTTCATACCCAAAGCAATCATTAACTATCTTCTGTCGAAAACCAC |
| | | TGAAAGCTTTGAGTCTCTGGCTGAAAAGCGGCTGAACGAGTTACGTTTAGAGACTATCGATTACCTTAACATCAT |
| | | CAAACGTCAGCGCATTCATTTCATGGATAAACCGGGCAGTAAAAATTATATTGAGATGAAAAGTGGAGAGATG |
| | | GCAAATTTTCTCGCACATGATATGATACGTATGCAGAAACCAGTTGGTAAAGAGGATGGCAAAGCAAATTCTAC |
| | | AGAATTTCAGCTCTTACAGGCGAAACTGGCCTTCTTCACAGTGAATAAAAGTACTCTGTTCGAGACGTTCAAACT |
| | | TTGTAATCTGGTTGATGCAATTAATGCGCACCCGTTCCTGTTCAATATCAATATCTCTGAATGTAATGGAATTCTC |
| | | GACTTCTACATTAACTATTTGGAGCAAAAGGTCGCCTACATTAACCTTTGCAAACGGGAAAAGCGTTACGAAGA |
| | | TTATCATTTCCTGAAAATTGGTGAACGCCGGCGCAGCTCGGGGAAGGAATATATCGGCAAGCTTAGCAAAGAGC |
| | | TGAAAGATGATGCCGTGATGAACCTTCCTCGTGGGCTCTTTCTGAAACCCATTCTGGAAGCTCTCGATTCCAAAG |
| | | ATAAAACGAAACGGCTGGTGACCGAGTTCAAGAAACTGGACAGAATTAATGCCGCGTTTATTATCGAAAAATAC |
| | | TTCGCGTATGTTAAGGCAGATAAACCGCAGGAATTTTACTACTACAAGCGCAGCTATGAGTTGCTGAACAAAAT |
| | | CTTAGATAACCGCAAAGATTTTGAGAAACGCAAAACCATCGCCAAACAGTACTTTGACACAAACGAATTAACCC |
| | | AGATGACGGGCAAAATTGAAGGTAATCCTAAAGAGAATCCGATTACGCGTCTGTTACCAGTCCTCGTACGCAAC |
| | | CATATCTTCAATAACCGTATCAAGAGTGAGGATGAGAAATTGCGGGTCAAAAAGGTCTACTTTGAAAAATATAA |
| | | AGACTTTACGGAAAGTGAGAAACAGTTTAGACTCGCGAAAACTTGCGACATTGTGCTGTTCATGATCGCCGACG |
| | | ATATGTTCCGAAAGAACTTCGTGGTGGATAAGAGCATATTGAAGAATAAGAACAAAGTGTCCGTTCAGGATGCG |
| | | GTCGAAATCGGAAAAGGCTATAAACTTAGCGAAATAAAACCAAATTCTGACGAAGGTTTTTTGTCCCTTCAGAC |
| | | ACGTGTAGAGCTTCAGATACAGGACAAGACAATAATCAAAGAACAGATAAAAATTAAGAATTACGGTGACTTT |
| | | CGTGGCCTGTTAAAAGATCGGAAAATTGGATCTCTGCTGCCTTTCATAGCCGACAAAGAAATTCAGTTTGAAGC |
| | | GTTACAGAAAGAATTAGAATTCTACGATAAGGCCCGAATAGACGTCTTTGCTAAAATTTTTGAGTTCGAGAAGT |
| | | CAATCATCGCAAAAATGAATCTCCAAAAAAACCCCGAGGGTTTTATTAATCACAAAGACATTCTTAAGTCCTTG |
| | | ATCTCAGAGAATGACGAGCGGTTTATCTTGGTCATGCAGTTGAGAAACGCGTTCTCGCATTCCAATTATCCGGAC |
| | | TACAGTTTGTTCAAAGATAAAGTGGCCGATTATGGTTTTAATGATCTGAAGAACCATACAAGTAACGATGATAC |
| | | CATCCTGGTCAAAAGCTTTGCCGTACAGTTTAAAAATTTGATACTCTCATATTATGATGAATTGAGCCGTATATA |
| | | A |
| 364 | JW13 | ATGCGTATACCTCAGCTGATCGCTCAAAATAAACCAGTTTTTGGAACTTATGCAACCATGGCGCTTAAAAACGT |
| | 189 | GCAGATAGTACTTGATCACATCCAGAAAATTGAGTCTCTCCAGGATCAGATGCCAGAGCGCAGACCCGAGGATT |
| | | TTTGGGTGCATCCAGTGATGCAGTTTTTTTATTCCGAACGTTATGCAACGAATGTCGATCCGGAGAAAGCAGACG |
| | | CTATTAAAGAACGCCTGTTTCGTAATTTTCCCTTTCTTAAAATCATGGCTGAAAATCAGCGCGACTATCGTTGTA |
| | | ATAAAGATCACAAAGGAAAACGAGGGTACCGAAATAATAATATCGACTCGTCGAATCTGGAAATCAACGGTAG |
| | | TGACATCTACTATGTTCTGAACAATATGTTTCGCGTTCTCAAGACGTATCGAGACAACACAATGCACGCCATAAT |
| | | TAAAGATGATAAAATTGACCGAAACGACAGTCCTTTTTTAGAGAAGAACGAGTCCCCACTCAGTTTCACGATTA |
| | | ATAACTATTACACAGTTGCTTTACGAAATGTCAAAGAACGTTATAGCTATGAAACTAGCGACCTTGCATTCATTC |
| | | AGGACTACAGAACAGACAAACGAACTCTGAAAACCGATTTTAATTTCTTCCTGTCCATGCAGGCACTGAACGGG |
| | | GACCCGACAGGACGTATTCATCTTAGTGGCGTAGGGGTCGTTCAGTTGATATGTCTCTTTTTAGAAAAGAAATAT |
| | | ATCAACTTGTTCCTGTCAAAACTGCCAGCGCTGTGGGGCGGCTACGATGAAAGCTCAGAAGAAGCACGCGTGAT |
| | | TCGTCGGTCCTTAAGCATCAATTCCGTGGTTTTACCTAAAGAACGCATTCGTTCAGATAAACGTTCTATGTCTAC |
| | | TGCCCTCGATATGATCAATGAGCTGAAACGTTGCCCTCGCGAATTATTTGATACTCTGAGTCAGGAAGATCAGG |
| | | ATCGCTTTCGTGTTGTTTCCTCTGATTATAATGAAGTCTTACATGTGAGACATTCTGACCGGTTCGCCCAATTATC |
| | | CTTGCAATATATTGATTCCAATGAACTGTTCAAGGGTATTCGCTTTCATGTTAATATGGGTAAACTGCGTTATCTT |
| | | TTTAGTGCGAACAAAAGTTGCATTGATGGTGGTGTTCGGGTGCGTGTACTGGAACAACCATTAAACGGATTTGG |
| | | ACGTCTCGATGAAATGGAACAATATCGTCGCCAGAATGATACCACCTATGGCGATAGCAATATCGTGATTCGCG |
| | | ACTTTGAGAATGTGCAACGCGATGCTGCTTGCGCCGATAACTACCCGTATGTCGTAGACACCTATACTCGTTATT |
| | | TGCTTAATAACAACAAGATAGAGATGTGCTTCTCCAACGATAAAGTGGTCCCAGATATCGAACTGGATGGGGGT |
| | | AAGTGGTATGTTGGCAAAACCATTCCGCACTGTCGCTTATCTACCTTAGAACTGCCCGCGATGATGTTTCACATG |
| | | CATCTTTTGGGTGCCGAAAAAACGGAGCAAAGAATCAAAAGTGTATATTACAATTACAAGAAATTGTTCACTGG |
| | | GCTTAAGGAAGGCACGTTGACAAAAGAAAATATCGATTCCTTTAATATATGTAGATCAGACATGCCGCAAAAAG |
| | | TATTGGATGCAGTAAGCGGCGAGGATAAAACAAAACGTGTGTCTAGCTATGTTGAAGATACCTTAAAGGAACTT |
| | | CTGGAAGAGACCGCTCGCTTAATCAAGAGATTTGAAGAAACCAGAAAAGCTATAGGTTCAAGTGCTAATAAAC |
| | | AGGGAAAGCGTAATTTTAAAAGTATTAGCAGCGGCAAGCTGGCGGATTTTCTGGCCAAAGATATCGTAAAGTTT |
| | | CAACCCTCATTAGAAAAAGATGAATATTATGGCACAGATCGGATGACTGGTCTGAACTATCGTGTTATGCAGTC |
| | | GTCGATTGCCATGTACAACAGTATGGGTGATAAGAAAGCGATGCAGGACTTTTACAATATGTTCAAAGCCGCTA |
| | | AGCTGGTGGAAGATAACAAAAAATCGCATCCTTTCCTCGCAGTCGCACTCAAACGGATTCCGAAAAACGCGATT |
| | | GAGTTTTACGAACAATATCTGAAAGCCCGCAAACAGTATCTTGAAAAGAAGATCGTAGAGTTCAATAAAACCGA |
| | | ACACGTTCGGATGTTTGCAGCCAATCTTCCGTTTATTAATATCGAGCGGAACAAGTGGGCCTCGCGTGATGAAG |
| | | ATTTCTATCAGATTTTAGGAGATAGCTACCTTGAAGTTTCACCCATTGAACTCCCTCGTCAAATGTTTGATGACG |
| | | AGATAAAAGCCAAGCTGAAACAGAAACCGGAAATGCAGGATATAGACTTTGACAAGGCGAACGTGACATATCT |
| | | TATTGGCGAGTATTTGAAACGCGTGCATAATGACAATTTCCAGGAGTTTTATGATTGGGAGCGTAACTATCGCTA |
| | | TATGGACATGCTGGAGTGTAAAGTCAATAACAAAAACTCAATAGAGAAACAGTATTTGACGATAGCAGAACGC |
| | | GAAGATGCGTGGGCCAATCGTGAACAAGGCGTGAAAAGATACACGCAATGGGCCAATGATAAAAAACTCTCAG |
| | | ATGCGAAGTTTAAAAATATGCCTGAGACAGAGTATGCTAAAATTGTTGCAACCCGGCTGTCTAGCTCAAGAAAC |
| | | GATTACCAGAAATCGGAAAAACATATTCGACGGTACAAAGTACAAGACGCAATGATGTTCTTTATGGTCAAAGA |
| | | TTCATTAACTAAGAACATCAATTTCGTGGCGAAAGATTTCAAGCTGCAGGATATAATGCCGGATGCAGATAAAG |
| | | GTATTTTAAGCGGGATCATGCCTATGGACTTCGTTTTTGAGAAAAAAGGCAAGGTCTACACCATTAGCTCACAA |
| | | GGGATGAAACTGAAAAACTACGGGGACTTTTTTGCGTTAGTTAACGACAAACGGATGAGTTCTTTACTGGAACT |
| | | GCTGCCGACGCCGCAGATAGGTAAAGAAGATATTGAACAGGAATTCAAAGGATATGACGACAGCAGAGTAGAC |
| | | GTTGTGTCTGTGATTTTAGATTTCGAGAAGTTCGTCTACAATAAGTACCCGGATATTAAGAATCTGGCTTTGCAG |
| | | GGTAACCATTTCGATTTTCTGGATATGTTGAAGGAACTGATAAACAAGGGGGACCTTACAGAGAATGAGAAAGA |
| | | ATTGCTGCGCAAAATACGGAATGCGTTTTCGCACAATTCTTATCCGGAAGGTGGCATCGTCGAGATTCGTACGCT |
| | | GCCAGAAATTGCAAAACATCTGATCCGTGTATTTGGTAATTCTATTGAACGTATCCAGCATTAA |
| 365 | JW13190 | ATGGCTAATTTTCAAGAACCGGCACGTCATATATTTGGTTCCTATCTTAACATCGCCCGTGCAAACTTCTACAAA |
| | | ACGATATTCCACATCTTCTCAATATCAGGGATCGACTGCTATACGCAAAAGGGTGACTTGTATTTCAAAGAAGA |
| | | TAACCTGGACAAGGTGATAAAGGTATTCTACCTGATCTCGAAAGGCGAAAGCACCAAAGATGAAGGGACAAAA |
| | | GTATCACTCGAAGAAGAAATCAAAGCGTCGATCGATACCGTTTATGAAGTCATCAAAAAATGTTATGATAACCG |
| | | CTGGAATAACGAGGTTAAACAGTACACAAATTTGACGGAACGTGAAAAAAATGCACGCAAAGAGGCTTTCAAA |
| | | GCCCCTTTGACCGATGAAGGACCGAATGGGGAAAAAGCAAGAATTCGTAATACCTTTACAATTAAAGGAGAGC |
| | | AGGAAGAACGCTTCCGCAAAATGTTATTTCGACACATTCCTCTGCTGGCTCCGATTATGGCGAATGTTGTGGCAA |
| | | TGCAGTTCAAGAAGAATGTTAATGAACAGAAAGAGAGCAATAAGGCGATGCATGACGCGAGCCTGACGGACTG |
| | | CTTGAAAGAGTTATATTCGATTGCACAGTGTCTCACGGATTGCAGAAATTTCTACACCCACATGAATCCCTACAA |
| | | TAGTATTGAAAAACAGAAGGATCAGTTCAAACTCCAAAATATCATAGCCGGCAATTTGGATAAAGCGTTTGCTG |
| | | CAAGCCGGCGGATCGCCAAAAAACGTAACAGCTATTCTGAATCAGATCTGACTTTTTTAACGGGACATCAGGAT |
| | | GACTGTCGTATGCAAGAAGTGTTTGTCCTGGACGAAAATGGGAAAAAAAAGTGGAAAGTCGAAAAAAACGAGA |
| | | AAGGCGAAACCAAGCTTGACAAGGAGAAGAACCCTATCTACATCTACAAGAAAGTGAAAGCTAAAGACGATAA |
| | | AGGGAAAGAAAAACGGGATGAAAATGGTAAACCCATCTATGAGGTCCTTTATGAAGATGGAAAACCAGTACAC |
| | | GAGTATGAAACTAAGTTGATCGAGCGCGAAGATTTTTATTACAGAATACGCGGGATTCGGCAAATACTGAACCC |
| | | GAATCTGACTCCTAATGGCGAAGTCTGCGATGGATTGTCTGCTTTTGGTATGTTATACTTTTGTTCACTCTTTCTT |
| | | AGTAAGGAACTGACAGTACAACTGTGTACTGAGACGCAAATTTTCGTGAACAGTCCGTACAACAATGATAACAA |
| | | TAAGAAGAGCAATATCATCTTAAACATGATGTTCGTTTACGCGATTCACATTCCGCGTGGCAAACGACTGGATA |
| | | GCGAATGTAGTTCTCAAGCCTTAGCGCTGGACATGTTGAACGAACTGCGTCGGTGTCCGATTGAATTATACAAT |
| | | GTATTGCCAGCCACCGGGAAAAGAGAGTTTGAAGACGATATTAAACATGAAAACGACCGGACTCCAGAGCTCG |
| | | CAAAACGCATACGGTCCAAAGATCGCTTCCCCCATCTCGCTCTGAATTACATCGACAGTCAGGGCCTGTTTGAG |
| | | AACATTCGTTTTCAAGTTCGTTTGGGGAGCTACCGTTTTTGCTTTTATGATAAGATATGTATAGATGGTAAAAAA |
| | | CATCCCCGTCAGCTGCATAAGGAAATCAATGGCTATGGTCGTCTGCAGGATATGGAGAAAGCACGTAAAGAAC |
| | | AGTATGGCCATCTTTTCCAACTGTCCCGCGATGAATCTGTATGGCAGAAAGATGAAAATGCTTATGTTAATCTTC |
| | | GGCAGCTTGTCCCGGTGAAAGCTGGAGACCCCGCGCATATTACAGACACCTTAGCGCAGTATAATTTTTATCAG |
| | | AATCGTATTGGCCTGTTCTGGAACACAGATGACGAGACTTATCTTACTGACAAAATCAATGCCCAGGGCCAAAT |
| | | TGTCGGTAAAGGTTTGTATCTGCCGCCTTTATCTGCAGTGGATACTCCAACAACCACCAATCGTTATAAACGTAA |
| | | AGCACCGATTGATATGCCAGCTCCTCTGTGTAGTCTGTCCACTTACGATCTGCCTGCTCTGCTGTTTTATGAACAG |
| | | CTGCGCCGTAAACACCAGTTAGAACCAAATGACTTCCCGGCAGCGGAAGACATCATTATTCGCCAATATGAAAA |
| | | TATGGTGCGTTTTTTTACGGAAGTTAAAGATATGGGCACATTTGATAATGACGATGCCCTGCAAGAGAAATTAA |
| | | AAGAGTATGGCTTATCGAAAGCCTCTATTCCGCAGAAGATCTATCGCCACCTTGTTCAGAAAACCCCGGATAAT |
| | | GCGAAAGACTTTGAGAAATCCGCCAAAGCGGAGCTGCGCCGTCGTTTACATATTGCCGAGGCGAAACTGTCTTG |
| | | CTTCGATAAGGATAAAGAGAAAATGGAATCAGACAAAGAAGATGACCGGAAGTACAAGAAATATGGCAGTAA |
| | | GTACTTTATATCGATTCGGTATGCCCAACTGGCCCGGTATCTTGCTGAAAGCATAATGGATTGGACACCGAATGC |
| | | AAAACAAGGTAAAGATAAACTGACAGGATTAAACTATCGCGTTCTCGTTTCATCCTTAGCGGGATTTGGTACTC |
| | | GTTATTCTGATGAAGATATATTACAAATTCTGGCGGACGCGCACATCTATGTGGATGAGAAAAACGACCACCCC |
| | | TTTATTGGCTACGTGTTTGATGAATATCCAACAGATATTGAAATGCTGTACTCCGAGTACCTTAAGCGAGAAATT |
| | | AAAGAGATAAAGAAGTACATTAGCGTGGGTATTGATGCCAAAACGGGTGAGGAAACCATTACCTTGAAGAAAG |
| | | ATGCAAGTGGTATTCCATTTCTGCATCATGACCGAAAACGATGGCAACAGTCTTCAATTGCAGAACTCACAGAT |
| | | CGCTATCTTCATATTAAAGAGGAAGGAAAAGCTGAACCTGGGAGAGCTACGTTATTATTACCGGACGGACTCTT |
| | | TGCGCCGTATATCGTCAAAATGTTAGAAAAGTGTGACTCATCTGCACTTGAAAATTGCGATGACAAGAGTAACG |
| | | CCGCATTTCTTATTAGCCGCTATTTCGAGAACAAATGTGAGAAATCTCAACCGTTCTATGACACCACCGAACCAT |
| | | CTCATTTTAATGATGAATTGCGGAAAGTAACTCCGTATAAGTATAGCCGAGCGTATGAGTATTTTAAACTGCTGA |
| | | ACGGCGGTAAGGATATCTATCTTCCTATTACTGAAATTAAACGAAGACTGGCAGATAAAGAACGGAGAATAGA |
| | | CGCCAATATCAAAAATCTGACCGATAAGGGTAACTATCAAACGATCGAGGAAGCCAGAGAAGGTCGTCGGCGC |
| | | AAACTTGAACGCGCAGTTAGAGATATGCAGGACAATGAGAGAGCTATTCGCCGCTACAAGACTCAGGATCGAA |
| | | TTCTGTTCATGATGGCCAAAAGTATGTTAGGGGATATTGTGAATCAGAATGCAGATCTTTTTAAACTCGAAAATG |
| | | TTTGCGAGAACAATTTCTTGTCACAGCGCGTAAAGGCCCAGATTAGCGTGAAAAGTAACAACCAGCAGATCACA |
| | | ATCCAGAAAGATGACATGCCAATAAAGGATTACGGTAAACTGTTTCGCTTATTAAACGACGAACGTACCGTCCA |
| | | GCTGCTGAGCTATTCCATACTTACGAATCCACCTCTCATTGATTTTGATCAGATCAGTGAGGAGCTCAAACAATA |
| | | TAACACCATACGTTCTTCAGCCTTTAAAAGTTTTCAACAGATGGAGCAGGAATCCTTTATTCAGCATGAACGTGT |
| | | CTTAACGGATCCTGAGAACAACGATTTTTATCAGGGCGGTAGACGCTACAAGAATAATGAACAAACCAAAGAG |
| | | AATGATGCGAAACGCAATAACTTTTCGTCATTGCTGAAGATTCTGCAGTGCCTGACACCCGAGGTGATGAACAT |
| | | GTTTGAGGAAAATGATCGTCAGTTGATAACAGCTATTAGAAATGCCTTCGATCATAACAGCTATCCCAACTGGG |
| | | AAGTGTGCCGCCAGTTACTTGAGCAAGAACAGCAAGTTAATGCGAACATTCAGCTCGAACTGTCCCAGGTAGCT |
| | | GCATTCTTAATCTCGAAGATCCGTAACTATGTTAAACAGATAGAAGAAGTTTGCCATTCGTCACACCAGTAA |
| 366 | JW13191 | ATGCCGCTGCGCTTTAAAAATTCAGAAGAACGGAAGCCGGTCCTGGGAGCCTATGCCGCTATGGCCCGCAATAA |
| | | CGCTTACATTATCCTTAGCGACATCATGGAGCGCTTACATATTGAGCAACCGCCACTCCCAGACCCAGCTCACCC |
| | | TGGCCAATGTTTAGATAAAGAAGCACATCTGGACAAACTGAGCCTCTTTCCTCAGAATAATGATCTCATGCCGG |
| | | AAACAAAGGATAAAGCAATGAAGCTGCTGTGCTCCCATTTCCCTTTCCTTCAGACTGAGGGTGATCTGCGTATTA |
| | | TGAATGCTCCAGATGGGCGTGAACAGGAGAAAATCCCGATCACCTATGAGGAAAAATGTCGTACTTTACTGGAT |
| | | GCATTGGCTGTTTTAACTTATCTTCGGGATGCGAATCTTCATTATCTTTTTAATGATCGTCGCGCTGAACACCTTG |
| | | AATATCGCCTGCCTGAGAGCAAAGCTTGTCATCTGTTACGTCTGGTGTTAAAAGCGGCGCCGCGCAAAATAAGC |
| | | GAACGGTATAAAGGCACTGGGTTAATGCCTGATGGCGCCCTGGATTTTTTTATCAAAAAGCAGTATGTGCGGGA |
| | | AGGTCGTTCGTTCAAGTTCAATATGAATTGGTTGTTTTCTCCGCAGCGCGAGCCGGAAAAACGGGAAATGGATG |
| | | TTTATCGAAAAGTGGAATTGGCCGGCGGTGTGGAGAGAGATCTTGTTGCAAACCCTGACGGAACCCCAGCCAGA |
| | | TTCAATCGGTTAAGCCTGTTTGGGGAAGTTTTACTGATAAGTTTATTCACCGAAAAGCGGTACATACCAGACTTC |
| | | CTTAAAGCCTGCGGATTGTTGACCGATAATGGCTTCACGGAAACTACACAGGATGGTACATTGTCCCAGCAGCG |
| | | GCTGATTCGTGAGATAGTTGCAGCGTATGGCATTCGCCTTCCCAAACGTCGATTGGACATTACTATGGATGCGGA |
| | | CCAAGTAATGCTGGATATCTTCAATGAGCTCGCGAAGTGTCCTGATGAGTTATATCTGGTTCTGCCCGAGGCCAA |
| | | AAAAAAGGAACTCGAGGCAGTCAATATCGATGGGGAGACGGTTATCAAAAAACGCCACAGTGACCGTTTTGTA |
| | | CCACTGTTGCTGCGGTTTATCGACACGAACGAGTTGTTCCCCTCTATTAGATTTCAAGTGAACTCGGGGTATCTT |
| | | CGTTTTCTGCATCACGAAAAAGCAGCTTATATGGATGGCGTTGAAAGACCGCGTATCCTGCAGGACGCCGTGAA |
| | | TGGTTTTGGACGCATTCAGGAAGTTGAACGGACGCGTTCAGCATCAGATACGTATCTTGGATTTCCATTATACGC |
| | | ACCCTCTCCTGATGACGATGCCCCAATGTCTCTGCCCTGTATTACCGACTCAGCGAGCCGCTATATTGTTAACGG |
| | | TGAATGCATAGGTTTATCAATCTCTGGGGATCGCACACCAGTTATTATTCAAGACGGTGGTAAGTATCGCGTCCG |
| | | CTCCCCCTTACCGGATTGTTGGATTTCGCGATACGAATTGCCGGCTATGGGGTTTTATTTGTATCTGTGCAAAAA |
| | | ATACGATCTTAGTGTGAGCGCGGAGAAGATCATCATTGATAAAGTAAACGAATACAGATCTTTTTTTCAAGGTG |
| | | TCGCCAATGGGACAATCACTAGTCTGAAAGGTATAACGCTGGCGGAAAAGGACATTCCTGGTAAGCTGTTAGAC |
| | | TACCTTAATGGCAAGACCGACAGTTCAGATTTTAATCGCTATAAGAAGAACCTTATCCAGTCCTTACTCGAGAA |
| | | AACCGAAAATCGTTTGAAACGTTTTCTCGAAGATATGGCAATGGTGGGCAGTAAAGAAAATCGAATAGGCAAA |
| | | CGTAGCTTTGTGAGAGTTTTACCGGGTAAACTGGCATCCTACCTGGCAGATGATATTGTATTTTTCCAGTCATAT |
| | | CCGGCGGGCCATCCGGAAAAACGTCTCACAGGTCAGCAATTTTCGATTCTGCAGGGCTTGCTGGCCACCTTCCC |
| | | GCCTGATATTGAAGATTCTTGTCGCCGTGCGGGACTCCTGTCCGGTGAAACAGCCCATCCCTTCCTGAAAGCTGT |
| | | GTTCGATTCGATACCAGCCAAAGATAGAAACACGTTAGTATTTTATGAGATCTACCTTAAACGAAAGATTGCGT |
| | | TTCTGAAGGGCCCTATACCGGACAGCGCGCCCTTCCTGCACCCAGGAAAAGTCAAGTGGCAAAAAAAAGATGC |
| | | GGCTTATTATAAAGCCCTGGCACAGAGATATCTTGATGGTGGCAAAGACGGCTCTAATACTGGTATTTTATTACC |
| | | CCGTGGACTGTTTGATCAGGCGATTACCGATGTTTTAACCAAACGTTGCCCAGGTTGGTCAAGAGCGATCCAGA |
| | | ATACTGATCATGCTAACACCGCCTTCAAGATTATCACGTATCTGTTGGATGGGCAAGCAGATGACTACCAATGG |
| | | TTTTATTATGAAGAAGACCGGTTACAGGAGTATCGATTTTCCCAGTTAATAATTAGCCAGAACGCTGTAAGAAA |
| | | CGGATGGAAAGATCTTAAAGCCATTCTGCAAGAAGAGGGCGTTAAGCTGAAAGGTAATTACTACAAAGAGCTC |
| | | GAGGGTCGTATATCTGCTCTCAGACGTATTCCGCCGGAACGGCTGGCTCGCAACACAATGAAACGCGAGGAGCT |
| | | CCGTCAGGCACTGCGTTCAAGCTATGACCGTATGTGCGAAAACGAAAAGTCCATCCGACGTATTATTGTCCAAG |
| | | ACATCGTGCTCTTTCTGCTGGCCAGATGGCGGCTGGATCCGCGAGAGAAATTAAACATGAGTATGATAGGTCAA |
| | | GATGAATCGAAGCTGATGAATCAAGTGGTAACCGTTGACACTTTATACAAAGGGCAGTATCGTATTCGCCAGAA |
| | | TGATGTTCGCATTAAAGATCAGGGGGTTCTGTTCAAAACATTGAACGATAAGCGAATTGACAGTTTATTGGATC |
| | | AGTTGGCGGTAGGCGAGGGAGAAGTGATTGACCTTGAAGACCTTATAGCGGAACTGACCCGGTATGACGATCGT |
| | | CGCATTCCTGTCGTCGCAAAAATTATGGAGTACGAAAAACGCGTACTGAAAAACCACCCTGAATTACGTGATCG |
| | | TAGTGGTCGTATGGATTTTAAAAGTGTGCAGCGTGCCGACGAAGCATCATCGCCGCAGAAAAAAGTAGTCTTAC |
| | | GCACAGTTCGCAATGCTTTTAGCCATAACGCATACCCGGATCGTGTGGTGAAAGCGGAAGGCGAAGAAGGAAT |
| | | AGAAATCTACAACCCGATCATCCCTGGGATGGCAGACGGCATATCTGGAACAACGAATAAACTTGTCGATGAAT |
| | | AA |
| 367 | JW13192 | ATGGGCAAAATAGTCAAACCGGGCGAGAAGATCCGCGAAATGAAAGAAACCTACAAGTTTCGCGTCAACAAAC |
| | | ACCCGTTCTCCATTGAAGAAGTTGGCAAAAATATCTGTGGCGCCTACTTCAACATCGCACGTCAGAATTTTTATC |
| | | GTACACTCCTGCACATTTTCAGCTCGGTTGGGATAGATTGCTACACGAGTAAGAATTCCTTGTTTGTAAAGGAAG |
| | | ATACTATGGCAAGTGCCCTCGAGGCGCTGCAGGCTATAGAGAAAGATAAAAACACAAAAGAAAAAGTGACGCA |
| | | GGCTATTGAATCGCTGTATCAATTAGTCGAGAATTGTTATGACATGGAGTGGGAGCTGTTTTGTCAAAAAGAGT |
| | | ATGGTGGAAAGATTTCATCAATTAACGCTGAATTGAAAAAGGATTTGAGTGAGGATCTGAAAAATCAGCTGAAC |
| | | ACAGAGAAGGAGAAGATTGAAAAAGAACAACAGGACAAGCAGGAAGAGTTTTACAAAGACATTGAAAATGAG |
| | | AAAAACCGTCTGCGCCAAAGTTTTATTCTGAAATCGGAACAGGAAGAAAAACTGCGGAAGCTGTTGTTCAAACA |
| | | TCTCCCGTTCCTGTCTCCTATCATGGCAGATGTGGTCGCATATAATAATTCACATGCTGAAGGTGACACCATCAA |
| | | CAATGGAGTAATGAAAGACGTTACCCTGGCCGAATGTTTGCAACAGCTGGTGACCATAGCAAAGTGTTTAAACG |
| | | ATTGTCGGGATTTTTATTCCCATTACAATCCGTATGACAGTGTAGAAGTTCAGATAGAGCAATTCAAAAGACAG |
| | | AATGATCTGGCAATCAAACTGGACAAAGTTTTTGTTGCTTCCCGCCGGAAAGTTAAAGAACGAAATCAGTATAC |
| | | GGAGACGCAACTCGAGTTTTTAACCGGCAAACTGCACTATAGAAATCTCGAAAAGAAAGAACGCGATAATAAT |
| | | GGGGGCAAAAACAAGATACCTGAGGAGCGCCGCTATTATTATTACCGTATTCGCGGCGAACGCAAGTTTAAAGA |
| | | TGTCGAAAATTTTGAGGACTATAAGGATAAAAAGTCTCCAGCGATGTCGGACTTTGGGATAGTGTTTTTCTGCAG |
| | | TCTGTTCTTGAGTAAGGAATACACGACATTAATGTGTAACCAATTAGAACTTTTTGATCACTCACCCTTTACTGA |
| | | AGAAGCGAACAATATAGTGCATAACATGCTGTACGTATATCGGATCCACACCCCCAAAGGCAAAAGATTAGATT |
| | | CTGAAAATGATGAAAACGCATTAGGAATGGATATCCTGAACGAGCTCAGACGCTGTCCGATGCCTCTGTATGAG |
| | | GTCCTGCCGCCGCTCGGGCGCAAAGAATTTGAAGATGATGTTCGGCATCAAAATTCCCGGACCGAAGAAATAAG |
| | | CAAACGTTTGCGTTACGTAGATCGTTTTCCGTCTTTAGTGTTAAAATACATCGATGCTCAGAAACTGTTCTCTCA |
| | | AATTCGTTTTCAGGTACGATTGGGGTCTTACCGTTTCTCTTTTTATGACAAAATTTGCATCGATGGAGAACCTCAT |
| | | CTTCGCATTTTACACAAAGAGATTAATGGATTTGGGCGGTTGCAAGACATGGAAAAACTGAGAAAAAGTGAATA |
| | | TGGCGCCTATTTTCCAAAAACGCGTCAGGATAATGTATGGCAGCGTGATGAAAATGCGTATGTAGATCTTGTGC |
| | | AGCTCGTTCCAAACAAAGCTGAGGACGATCCGCAACTGACTAATAGCATCGCGCAGTACAACATTCATCAAAAT |
| | | CGAATCGGCCTGTTCTGGAACCAAGAGGGAAATAGCATTTTGGTGGATAAAAAAGGAGAAGACGAAAAACCGT |
| | | TATATGAAGGTTATTATCTGCCGCCCCTGTCTGTTGTGAAACAGACTACTTCAGAGCCTGAAAAGGATAAAAAC |
| | | AAAGCCCTTGTGGAAATGCCTGCGCCACTGTGCTCGTTATCTGTTTATGATCTTCCGGGTTTAATTCTGTATCAGC |
| | | ATCTTGTTGCTACACAACAGGGCTGCGAGTCTGTGGATGACGTTATTATCCACAAGTATCAAAAGATGGTGTCAT |
| | | TCTTCAATGACATCATTGAAGGTAAACTGCAGCCTCAGGATTCAGTTGCGGAGCTGGACAAAAAGCTTAAGGAC |
| | | TACTATGATCTCTCTAAAGCTAGTGTGCCTAAAAAAGTTTATCGTATATTATCCAGTCAAGAATTCAACAGAGAA |
| | | GAAGATCTTAAGGCCTTTGCTCTGAACGCATTAACACGTCGTTTAAGAAATGCCATTCGGCGTAAAACGAGATT |
| | | TTCAGAAGACCTTGCCAAAATTGGTCAGAAAGACAACAAGTACGGCAAAAAGAATTTTGTTGATGTCCGCCACG |
| | | GGGCCTTAGGCCAGTATCTGGCTGAATCGATACTCGACTGGCAGGTTACTTTTGATGGTGGTAAAGATAAACTT |
| | | ACTGGTTTGAACTATAGAGTCCTGGCATCGTGTCTGGCAAAGTTTGGTGATGGTAACACCAACCTGAACTATATT |
| | | AAAACGATTTTACGCAAGGCCAAAATTCTTGCTAATGAGGGAGAAAAAATAGCCAACGAACATCCCTTCATATC |
| | | AAAGGCCCTGGACAATTATCCCGATAACATAGAGGATTTCTATTTGGATTATCTTGATGCCGAAATTGAATACAT |
| | | CAAGAAATATGTGGACATTGAGGAATCCGGGCAGGAGATAACCAAGGTGACATTGAAAAGCGATGCGGACTTG |
| | | AGTAAACTGAACTTTGTACATAGCGAACGTAAACGCTGGGTTAAGAGTGCAGCAGAAGATCTGAAAGAATTAG |
| | | CCGCGCGTTATTTGTATGTGGAAGATCGTAATGTGAACGGTGAAGTTGTGACGCACCGGGCTACATTATTATTGC |
| | | CAGATGGCTTATTCGCAAGCCCGATTGTAGAGGTATTAAAAAAAAGATATGAAAAAGATGACCCGATTATGGCA |
| | | GCGCTTAACAACGAGAATCTTAATCATAACGTAGATTACCTGGTTAAACTTGTCTTTGAGAAAGAAAATGCCGG |
| | | AGACACTAGCCAGCCCTATTATAACAGCAATTTTGAAGTATTACCTGTCTACAACTCTAATACCGTTCCAGACTT |
| | | TCTTCGCGAGAATCCTGGTAATAACAAGTATGTCCGTGGTTACGAACTGTTCAAAGCAATTCATGGTAAACCCAT |
| | | CTTTTACAGCAGTGACGAAATCCAGGTGTTCCTTTCTAAAAAAATCACCGATCGTAACACCGAGTCACCTCTGAA |
| | | AATTGTTAATCGCCAGGGAGAAGAATGCTGCAAACGTGAAATCCATGCGAAAATAGACGCTAATGTGGAAGGG |
| | | GTGCGTACCAAAGGTGATTTTGATTCTCTGGAAGAAGCGCGAAATGCGCGCCGTAGAAAGCTTGAAATACTGTT |
| | | AAAGGAGTGCAAAGAGTCCGAGAAAACAATTCGCCGCTACAAAGCTCAGGATATGATTCTCTTCCTGATGGCAA |
| | | AAAATCTTCTCTCCAATGCGATTGGAGAGTCAGACAAGTTCAAACTTTCAAAAGTCTGCGACGATGACTTTCTCG |
| | | ATCAAAAGATCAATGCCCACATCACTTTGCATCTTGATGATTACACGGTTAAGATTCAGAAAGAAGAGATGCCG |
| | | ATCAAAAACTACGGCCAGCTTTTTCGACTGTTGAGCGATAATCGAGTCATGACAATTTTAAGCTATCCGTCCATT |
| | | AATGAAGCCACTTTAGAATACGACGATCTGATTGAAGAACTGTCCATCTACGATGAACGGCGTACCTCAGTTTTT |
| | | GACGTGGCGCAAAAATTAGAGCGTGCGTCGTTTGTACAACATAAAGAGGAGCTGACAAATCCAGAAAACGATC |
| | | TTTTTTATTGTCATAACAAACGATATCGCGTCAACAGCGGCCGAGAGAATCAGCCAAAACGGAATAATTTTGAA |
| | | GCAATGCTGAAATTACTGCTCAAGATGACACCGCAGCAGCAGTCAATGTTTAGTAAAGTCGAACAGGACTTTAT |
| | | CAAAAATATACGTAATAGCTTCGGTCATAACGGCTATCCAATCCGGAATACCATCGAACGTATTGCCAATGGTA |
| | | ATGATCCAAAGTTTGCGGATTTGAAAGAGATGCAGCTGAAAGGTATTGCAAGCCTCTTCGCAGGGAAACTGTTA |
| | | GATTGCCTGAATGATAATAATATTGAATAA |
| 368 | JW13193 | ATGAAATTGTCACTGAAACCGGATTCACAGCTCAAACCTATCTTTGGAGCTTACGCTGCGATGGCGCGGAACAA |
| | | TATTTTCCTCACTGTGCTGGATGTCATGAAGCAGTTACACATACCCCAGGAGCCATTGTTCGACCCGCGCGGCAA |
| | | TGAGCTGGACCTTGAAGCCAATATCTGGAAACTGAGCTTATTTGTTATCCATCTTAAACCCGAGCAGTCTTCGAA |
| | | AGCGGATAAACTGTTACGTACTCACTTCCCTTTTCTGGACCTTCTGAACGATATCAAAATCGGATCAATTAAAGG |
| | | TGAATCGTTTCATTACAATGTGAGTTTCAAGGACACGAAACAGTTGTTGCTTAACGGTGTGAATGTGTTATCCCA |
| | | TCTTAGAGACATTAACCTGCATTACAAGACAAATGACGGGAAAATAAACGACTACTATTATCGGAAATATGAAA |
| | | ACGTATGGTCAAACCATCTGATAGGTCTGCTCAAGGCTGCCCCACGCGTCATCAAAGAGCGTTATAAACAGACC |
| | | AGTCTCCTGTCTCCACAGTCAATGGATTTTTTTACCAAAGATTCCTACCTTAAAAACACCGACGGTTACATTCTC |
| | | AACCCAGACTGGTTGTTTTGCCCGACACGAAAACCGGGCGACAATGAGCTTTACATCTACAAAGATAAAAAACC |
| | | TTATCGGGTGGAAAAGGAACGTTTTGATCGTCTCACCCGTTTCGGGGAGATTTTAACCATTGCTCTTTTCATCGA |
| | | ACGGCGGTACATCTCGGATTTTTTAAGTGAATGCGGTCTGTTAGGTCAGTTTCCGAGTAGCACAAATGACGGTA |
| | | GTATATCCCAAAGACGTCTGCTGAAAGAACTGATTAGTGTATATTGTATCCACCTTCCCAACCGTCGTCTCGACA |
| | | TTTCGATCGGTGAAACTCAGATCAAACTTGATATGTTAAACGAATTGGCAAAGTGTCCTGATGAGCTTTATATGG |
| | | TTCTGCCAGACACCATTAAAACAAAGTTCGAGATAATCGGTATCGATGGGCGTCCGGTCTTTATGAAGCGCTATT |
| | | CAGATCGCTATCCGGCATTACTTCTGAATTATTTCGACACGACTGGCTCATTTGAAAAGCTGAGATTTCAAGTTA |
| | | ACGCGGGCTATTTGAAATATGTTCATCATGGGATAACAGATTACATGGATGGCGTCGGCCGTGTGCGTATTATTC |
| | | AAGATGGTCTGAACTGCTTTGGTCGTCGCCACGAAGTCGAATCCAAACTGAAAGAACAGTTTTCGATTCATGGA |
| | | TTTCCGGTCATACGCAATAATGAAGAGGAAGCAAATATTGATTACCCGTTTATTACCGAAAGCGGAACCCGATA |
| | | CGTGTTTAACGGTGATATGATCGGAATCAGTCTGTATGGAGATATCATGCCACGCTTCGAGCAGTATACAGAGA |
| | | ATAATACCGTACGTTATCGTGTTCGGAATACTACTCCTGATTGTTGGATATCTAAGTACGAGCTCCCAGCCATGG |
| | | CATTCTATTATTATCTGTCTAAAAAATACAATGAAGGCGTTTCGGTTGAACAGCTGCTGTCTCAGACGACAGAAC |
| | | AATATCGCAAGTTTTTTCAGGGAGTTAGTGATGGCACGATAAAAAGCTTATCAGACATCGATATTCCCATTAAA |
| | | GCAATTCCGCAAAAACTTCAGCTCTTTCTCAAGGGCGAATCCAGTCACGAAGATTATAATAAGTTCAAAGAGCG |
| | | CGTCATCTCCAAAATGATTGAAGAGACCGATATTCGTCTGAGTCGATTAAAAGACAACCTGGAAGTGGTGTTTC |
| | | AACGGGATAATAAAATTGGCAAAAAAACACGCGTACGTTTAAAGCCGGGCGTGTTATCGGATTATCTGGCCAAA |
| | | GACATCGTTCGCTTTCAATCATTTCCGGACAATCATCCAGAGAAGAAGATGACCGGACAACAGTTTTCTATATTG |
| | | CAGGGTTTGATAGCTACTTTTAGCGAAGAGCTTGAAGTAAGCTGTAAACGAGCCGGTCTGTTAGATGGCCCTAG |
| | | TAGCCACCCATTCCTCTCCCGTGTCTTCTCACGTCATAGAGGGCAAATGCGGAGCACTATTGATTTTTATCAGGC |
| | | GTATCTTGAGGAAAGACGTGCCTATCTGAGTGGTAGTATTCCGGATGATGCTCACTTCTTGCACCCGAATCGCGT |
| | | TAAGTGGAGCCATGATAAACAGGAATCATATTTCCGGAGCCTTTCTACACGTTATATTAAAGATGAAATAACCG |
| | | GTGAAAGAATTGGCATTTTTCTGCCCAGAGGCTTATTTCTGAAGCCCGCTCTGAAAATTATCGCAAACAACTGCC |
| | | CTAAGACGGCCCGCTTCTTAAAAGAGCAGGAGCGCATTAACATGAGCTTTTTGATCCTGACGTACTTGGAAGAA |
| | | GAGTTGCAAGACCAGAATCAGGGATATTATTACGATCATCTCGAAACAGGTAATGGTGAATATGACTTTTACAA |
| | | AATTATTGATCGCGAGAAGAAAGAGTTTGGCGACAAACGGTTAGGGTATATTATTCGAGCAGAACGAGATAGCT |
| | | GTCAAAATTCTCTGTACTTCTTCCAGCTTAAAAACGCGTTCGGCCACGTGCGCGAGTCTGCGCGGCCTATAGCCG |
| | | GGACAAAAGAGCTGGCCGAGAAATTAAGAGCCGCGTACAATAAAATGTGCAAAAACGAAAAGAAGATTCGCC |
| | | AATATATGATCCAGGATGCTACTCTGTTTCTGTTATCTCGAGATGTTGTTGGGCCAGCAGGGGGTCAAATGAAAT |
| | | TGGCAGATATCGATCCTACAGGGAACTCCGTTTTAGAACAAACCGTAGACGTTACGACAAATTATAAGGGTAAA |
| | | ACTATCAGACAGAGAAATGTCAAGGTAAAGAATTATGGTGAATTATACTCTGTGCTGAGCGACAAACGCATTAA |
| | | CACCTTACTGGAGTATCAGCCGAAAACCGAAAACAGCATACCGTTAGAAGCAATCAAAGAAGAGCTGGTGTCTT |
| | | ATGATCATGAACGGGTGCCCGTAATTACGAAAATTCAGGGGTATGAACGCGCCATTTGTGAAGAAAAACCGGA |
| | | ACTGTTCTCTGATGAAGATGCGCGTTATGATTTTAATGACATACAAAATGCGGATACTAAGACGCCTAATCTGA |
| | | ATAAAGTAGCTCTGAAAAAAATTAGAAATGCTTTTTCCCATAATCAGTATCCTGCACCGGTTGTGAAACAGGGC |
| | | AATAAAGAGATAGTTATTTTTACCCATTCGTTGCCCGATGTCGCGCGTGAGATATCATCAAAAGCAGGAGAATT |
| | | AACGAACTGGACGCCAGAAGAAGGATCCGAATAA |
| 369 | JW13194 | ATGGCACGCACAAACTTCGTGAAGACTATTAACTATATTCTGCCTATCGCTGGGGTGCGTGGCAATTATTCAGAA |
| | | TCCCAGATCAATAAAATGTTACACGCCCTCTTCCTTATACACGCAGGTAGATCTTCCGAATTGAGCGTAGAACAG |
| | | AGTAATTGGAAGAAACGCCTGACTTTGAACGTAGAACAGCAGGCTCGTCTCCAGCGTCTGTTGTTCAAACATTTT |
| | | CCGGTCTTACAACCAATGATGGCCGACGCAGCCGAGCATAAAGCGTACCTGGCTAAAAATAAAAAAAAGAGTG |
| | | ACGTGCAAACCGATGACGATGTATTTGCCCAATTCAAAGGTGTTAGCCTCGCGGAATGTCTTAATGTAGTCGCA |
| | | CTCATGGCAGATACACTGACTGAGTGCCGCAACTTCTACACGCACAAAGATCCATATAATACACCCGAACAATT |
| | | AGAAAAGCAGTATGAGCATCAAGAATTCATTGCTTTAAAACTCGATAAGGTAGTCGTGGCATCAAGACGAGTAT |
| | | TAAAGGATCGGGAAGGTTTAACCGTGGGAGAGGTTGAATTTCTGACCGGTATTGATCACATGAAGCAAGTCGAT |
| | | AAAAAAGATGAGAAAGGCAACGTCATCTACGTCGAGGATCGTGGTACACGAAAAAAAGCGAAAGCTTTTGTGG |
| | | AGTACGATGACTTCTACTTCAAAATTACGGGATCGCGTACTGCTGGTGGTAAAGCATGCTCCGCCTTAAGCGACT |
| | | TTGGCTTATTATATTTTTGCATCCTGTTCCTTAGTAAGCCCTATGCCAAGCTCTTTATCGATGAATCCCGTTTGTTT |
| | | GAGTTTTCACCTTTTGATGAGAATGAGAACATTATCATGCAGGAAATGTTAAGCATCTATAGAATCCGCACCCC |
| | | ACGGTTACATCGCATCGATAGTCGTGACAATAAAGCTGCGCTGGCCATGGACATATTTGGAGAAATGCGCAGAT |
| | | GTCCTATAGAACTGTATGATCTTCTGGATAAAGAACATGGTCAGCCGTTTTTTCACGATGAAGTTAAACATCCCA |
| | | ATTCGCATACGCCAGAAGTGTCGAAACGGCTGCGCTTAAACGATCGGTTTCCCCATCTGGCGCTGAGATATATC |
| | | GATGAAATGGAGCTGTTCAAGAGAGTTCGATTTCAGTTACAGATGGGCGCGTTCCGCTATAAGTTCTATGATAA |
| | | AGAGTGTATTGATGGGCGTGTTCGAGTGCGTCGTATACAGAAAGATATCAATGGTTATGGCCGTTTACAGGACG |
| | | TTGCCGATAAACGTATGGAAAGATGGGACGACCTGATTCAAAAACGTGAAGAACGGCCGGTCAAACTTGAGCA |
| | | TGAGGAATTATACATCGATCTGGATCAGTTCACTCAGGACTCTGCCGATAGCACTCCGTATGTTACAGATCGTCG |
| | | TCCAGCCTATAATATACACGCCAATAGAATTGGAATGTTTTGGGAAGAATCTCAGAACCCTCAGGGCTTCAAGT |
| | | TTTTTGACAAAAACGGGATGTACATACCCGTCTTATCCGTTACAGACGACCATAAAGCTCCTATTGCCATGCCGG |
| | | CACCTCGTTGCACGTTATCCGTACACGATCTGCCCGCCATGTTATTTTACGAATATCTTTTAAGTCAGTTAGACCA |
| | | AGAGGCGCGCAAACAATATCATTCAGCGGAACAGATTATTATTGGCATTGAAGCTGATTATCGCAAGTTTTTCG |
| | | GCGCAGTTGCAGATGGCAATATTAAACCGTTTGCCAGCTCAGAGAAATTTGCGGATTACCTGGAAGAAAATTAC |
| | | CCATCCATGTTGTTATCTGATATCCCTCAAAAAATTCGCCAGTATCTTTCGTCTGAACATCTGTCTTATGAAGGG |
| | | AAGCCAGTGACGGTGCGGGAACGCCTGGTTGAAGTTACTCTGAAACATCTTGCTGAGCGCATGGAGCGTCTGGA |
| | | ACGGCGTTTGAAAAACTACACGGAAGACCTTAAAAAGATTGGCAATAAAGACAATAAAATAGGAAAGAAGGAT |
| | | TTTGCGGACGTGCGTCATGGAGCACTGGCGCGCTATCTCGTGCAGGACATGATGGAGTGGCAGCCGTCTAAGGA |
| | | TGGGAAAGGCGCAGATAAACTGACCGGTCTGAACTATAACGTTCTGACCGCGTTTTTAGCAACCTATGGTACAC |
| | | CACAGGCTTCCATTGCCGACTCAGATATTGCCAAACTTAGTTTAAAGGAAGTTCTGCGTAACGCCCATCTGGTGG |
| | | GTGGGGACAACCCGCATCCCTTCCTGGAAGAGGTGCTGGCTTACGATAACAAAAACATTGAAGATTTTTATCTG |
| | | AACTACCTTACCGAAGAAGTGAACCACCTTAATTCACGTATTCAATCTTTGAGCTCGAATCCGACATATAAGGCT |
| | | TTGGAAAGTCTGCCTTTTGTACATCACAATCGTATTCGATATAATGAACGGACGGACGAGGAAATTCGCGCTTTA |
| | | GCGGGACGTTATGCGACTATTCAGCTGCCAGATGGCCTGTTCATACCGAATATTGTTGACCTTTTAGAAAATCAG |
| | | TATGCCACCAATACGGATATGCAAAAAGCGTTATCATTTGAAGGGGCAGATCATCTTAATCCGACCCGTAATGC |
| | | GACGTATCTGATAAGTCAGTTTTACAAAACTGTGCTGCACGACAATGCACAGCCATTTTATCAGACCGATAAGA |
| | | GTTATACTCGGCAGCAGGATGGCCAACCGCCTGTTGCATTTTCATTCCGCCGCGCCTATGATCTTTTTACGGAGC |
| | | TGAACAATGACAAAGAAGATTACTTTCCGTTTGAGTTGAAGCCGCTCTTCTTAACCAGCGAGGAAATCCAGCAA |
| | | CGCTTAACTGAAAAACGCCTGGGAAAAGATGGTAACCCGATTCCTCAACGGGAGAATGGAGAAATTAAGAAAG |
| | | ATGCTCAAGGGAATATTATTTGGGAACGTAAAATCACCCACGATGTTGACATATTTGTCAATACTCTCAGCAAC |
| | | AAGGATTTGAAATGCTCTAAAAATGAGGTTAAAGAGAAACGCGACGCGAAACGCGAAAAAATGAAGCGTATGG |
| | | TGCATGAAATCAAAAATAATGAAAGAACCATACGACGATATCGGACCCAGGACATGATCCTGTTTTTGTTAGCC |
| | | AAGAAAATGTTCGTTGACCTCTTGGGCGAGCAGTCACGGTCCGTCGATTGGAAGCAACTGCGGCTGAGCAAAGT |
| | | GTGTAATGACGCATTTCTGAGACAGACACTGACATTTCGTGTACCGGTAACGGTTGGAGATAACACAGTCTACG |
| | | TCGAGCAAGAGAACATGTCGCTTAAAAACTATGGTGAATTTTACCGCTTTCTGACAGACGATCGCTTGACCTCAC |
| | | TGTTTGAAAACATCGTAGATTCAATAGAACCGGATAAAAAAACAGGGGAACGTGTTATTAGCCATACCGATCTT |
| | | ATGTCTGAATTGGCGGCGTACGATCAAAGACGAAGTACTGTCTTCCGTCACATCCAGCAGATTGAGGATATTGT |
| | | GATCTCGGGGAATGCTATTCTGGCCAATCCTGATTGTGATAATTTTTGGGTAGATGGCAAAAGAGGTGAGCTCG |
| | | CAAAACGCAATAACTTTGCAAGTCTGCTGAAAATGATCGATCTTATAAACACGACAAGCTTGACGGATGACGAG |
| | | CGTACACTGCTCGTAGCAATTCGGAACGCGTTCGGTCATAATAGCTATCGAGTTGACTTGAAAAAAATCGGCGG |
| | | TATAAACAATCTTCCCGAAGTTGCAAATTCTATACTCAAACACTTGGAGACCCTTAGTGGTTTCTCTGCTGAATA |
| | | A |
| 370 | JW13195 | ATGTCGAAAAACGACAACATTAAGAGCAAAGCCAAAGCATTAGGCTTGAAAAGTACCTTTCAGGTTGGGGATG |
| | | AAGTAGTTATGACAAGCTTTGGTAAAGGAAATAAGGCCATTGTTGAAAAAATTGTCAGAGGCACAGATGTGCA |
| | | ATCCGTTCCTACTGAACCAAATTTTTCAGCAGAAATTGAGGGAAAAAAATTTGACCTTGTGGGCCGCGCACATA |
| | | TACAAACTAAAAGTGATAATCCGCAGTATTCTAAAAAACGCACCGGCGATGATATGATAGGTGCAAAAGCAGC |
| | | CTTGGAAAAGCGGTTCTTCGGCGGTACATTTGACGACAATATTCATATTCAGCTCGCGTACAATGTACTTGACAT |
| | | CGAAAAGATTCTGAGTGTGCACATTAATAATATCGTATATACCCTCAACAACATTCGGCGTAAGGATAATGCCG |
| | | AAGATGATGACTTTATCGGTTATATGTCCACGAGAAATGATTATGACACATTCATTGAACCCCGTAAACATAAT |
| | | ATATCAGAAGATGCGGCTAAAAGTATTGACAAGAGTAGAGCATCTTTTGAAGAATATCTGCAGCCGCCTGTTAA |
| | | AGATTGCCTTCATTATTTTGGAAATACTTTTTTTGCGCCCCGTGAAATAGAAAAGACCTATACCGATAATCGTGG |
| | | TTTTGAAAGAAAGAAAAAGGTCACCGTGAACTCACTGATTGATGAAAAAGAAATCTACTACATCTTCGCTCTGT |
| | | TAGGGGGTCTGCGGCAGTTTTGCACCCATGACAATAAAAGCGGCCGAAATTGGTTATATTCACTGGAAGAAAAT |
| | | GGCATCAATAGTGATGCGAAGGCGGTTTTAGATAAGTATTACAATTCTGCGGTAGCTCGCATAGATGAATCTTTT |
| | | GTAGATAATGCCTCTAAGACCAACTTCAAACTGATTTTCAATGCGATGGATGTGTCAGATGAGGCCCTGCAGGA |
| | | CAATATCGCGAAAGCGTTTTACAAATTCACAGTGTGTAAGTCGTTCAAAAATATGGGATTCTCGATTAAAAAAT |
| | | TACGCGAGCAATTGTTAGAGTTGCCAGAATATGAAGGACTCAAAGATAAGCACTATGACTCCGTGCGGTCGAAA |
| | | CTGTATCAGATCATGGACTTTGTTATCTACCTGTCTTTCAAAGACGAGAAGTTCAAAAAAGATAACGAGGAGAA |
| | | GATCAACAACATTGTCAACGAGCTCCGCGCTACTCTGAACGAAGAAGATAAAGGGCGGGTTTATGCATCCTATG |
| | | CAGAAAGAATGAAATCAGAGTTGAAACCCGCTATAGCCCGGCTCAAATCAGATATTGACAAGATTAAGGATTC |
| | | ACGCGTTAAAGAGTTTGAACTGGACGCAAGCGTTAAGTATCGTCTGAGCAAAGTCGTTGAATCTGTGAGACTGA |
| | | AAGATCGAGCAACTTATTTTACGAAGCTGATCTATCTGACTACTTTATTCCTGGACGGTAAAGAGATCAATGATC |
| | | TCCTCACCACGTTAATTCATCAGTTTGAAAATATCGCCAGCTTTATTGACGTGATGAACGATCGTGGTATAGACT |
| | | GCCGTTTCTCCGATGGGTACAAACTTTTCGAGTCGTCTAAACAAATTGCCTTTGAGTTACGAAATGTGAACAGTT |
| | | TCGCCCGCATGACACGCACTAGTAAAGATGACGAAAATGCTACCCACATGATGTATATAGATGCTGCTGAAATC |
| | | TTAGGCACTGACTATACCGAGGAACAAATTGAGGAACATCTTAATCTTGAAAAAAAACGTATGATACCAGGAAC |
| | | CAAGAAGGCCGATATGAACTTTCGTAACTTTATTATAAACAACGTGATAAAAAGCAGCCGGTTTAACTACCTCG |
| | | TGCGTTACAGCAATCCGAAAAAAATACGAGCGTTAGCGGATAATGAGGGCGTTATCAGATTTGTATTAGGTGAA |
| | | TTACCTGATGCTCAGATCGATCGTTATACTCTGCTCTGTGGCTTTAATCCAGACGCTGATCGCCAGGAAAAAACA |
| | | GATAAACTGGCCAAAGCAATCACAGGTCTTCGGTTTAATGATTTTGAAAATGTAAAACAGGGCGCCAACACGGA |
| | | AGGGGAGTCACAGGAGTCTATTGATAAAGCACAAAAACAAGGGTTAATTTCCCTGTACCTGACGGTTTTGTATT |
| | | TGCTTACGAAAAACCTGGTATACGTCAACAGCCGTTATTTTTTGGCGTTTCACTGTTTAGAACGCGATGCCCAGC |
| | | TGCTGGGTAGTGGGGCTGGTCATCACGAACCGTATGTCGCGTTGACCCAGCGCTTTATTAATGAAGACAAACTG |
| | | AACGAACATGCGTGCGAGTACCTGAAAACGAACATAGCAAATTCCGATGAGTATACAATTCGCATTTTTCGCAA |
| | | CAATGCGGCACATCTTTCTGCAGTTCGTAATGCAAACCTGTATATCGACAAACTTAAAGAGTTCAAATCGTACTA |
| | | CGAAATCTATCACTTTCTGTCACAAGAGAACATATACGGGAAGTATTGTGTCGATAAAAAGTATGTGACGGCTG |
| | | ACGAGAATGGTAGCAAAACGATTTCTGTCAAAATCTCCAAGGATTATTGTCCGCAGGTCTATATTGATAAAAGT |
| | | CTGGAATATTTCGATAAACTGAACAAGTACGGTACATACTGCAAAGATTTCACAAAAGCTTTGAACTCACCTTTC |
| | | GGATATAATCTTGCCCGTTATAAGAATCTTAGCATTGAAGGCTTGTTTGATCGTAATCGACCGGGAGACAAAGG |
| | | TGAAAATACGTTTGAGGATTAA |
| 371 | JW13 | ATGAACTTCGAAGAAAATGGGAATAAGTATCTTTTTGGAGCTTTCCTGAACACCGCGTACGATAATTATAACGA |
| | 196 | GGTGATCAGCCATATCTATGATGTTATTCGCCGAATTACTAATAACAATCCTACTGAACAGAAAAGTTCATCTCA |
| | | GGCTTTAGCATCCGAAGAACCGATCTCTTCCGAGGAGAAAGAAAAGATGTTCTTTGTGTGCACTATACTGATAG |
| | | CAGGCAACGCGACATCTCGTAAAATCGAATCAATATTAAAACGGGCGTTTCCGTTTTGGGATGATTTTATTGAA |
| | | ATCCATGCATCCTTATCAGCCCAGCTGGATAAAACGGAGTCCATCTTTCAGCTGCAGAAAAACTGCGTAGAAGA |
| | | GTTATTCACCGCACTGGAGAGTTGGAGAAATTACACCACGCATTATATTCACCCAGAGGCAATTGCTTCTCCCAC |
| | | CATCAATTTGCTGCTCAAAAGTTGCTTCAACCAGGGAATTAAAGAGATCAAAAAACGTTTCAACACAAAAGATG |
| | | AGCAGCTGACACATCTGTACGAGCCCGAGTTGTTTCATAATAAAGAGACCAACAAAGATGAAATCAAGTGCTAT |
| | | CACCCGGCTAATTATTATCGTTTTGCTAATGAAAACGGTCTGCTGACCGAAAAGGGTCTGGCGTTTTTTACATGT |
| | | CTCTTCCTGTACAAACGCGAGAGCTATCTTCTGCTGAACCAGCTGAAAGGCTTCAAACGTGCGGATGAAGAACG |
| | | CTATCGGATGACGCTGGAAGCGTTTACTGTTATGCGCTTTCGTGCACCGAAACAGCTTTTGAAACTTCAACAGCA |
| | | GCAGTTGGATAAAGTCTCATTGGGGATATCGATGATTAATGAGCTGGCCAAGTGCCCGAAAGAACTGTATGACT |
| | | GTTTGGAAAATGAAAAAAGACGACAGTTCGAAGTTTACCCGGATACTGAAACTACGTTATATGAACAAGAAGC |
| | | AATTGGAGAACTCATTCGTTATAAAGATCGGTATGAAAATCTTATGCTCAAAGCTCTGGAGCATAGTTCGGAAT |
| | | GTAAGTACATGGGCTTTTATTTGTCCCTCGGTAAGTGTTATATGAAATGCTATGAGAAACATTATATTGACGGTA |
| | | CTACCGACAATCGTTATATTGTCCATAGCCTTTATGGTTTTGGGCGTTTACAAAATGCCTCGACCGATCATAAAA |
| | | ATCATCTGAGTAGCTTTGGTGAAGAATTACAGACACACAGCCAATTACCCGTCTGTCACTTTGCCACTGAGGATG |
| | | ATGCGGCTGATAGTCCTACAAGTGTTCCTTATATTTCAGAGTCATATCCGTCTTATGTTCTCAACAATAACAATA |
| | | TCGGGATTAAGTGGCTGAACTCTTCCGAAAAAACGGAATACCCGAATTTTAATCTTAATGAAGGAAAAGTTTCC |
| | | TGTCCTGCCCCTGATTATTGGCTCTCTAAGTATGAACTGCCGGCTATGGCCTTTTACGCCTATCTTAAAGAGAAA |
| | | CACAAGAATAAACTGCAGGAGTATCCATCAATTAAGGAATTAATTGACCAGAGTCATCCGGAAGCTACCAAAA |
| | | CTTCGAGCTCGACAATCAAAGATAGATTAGAAGAACGACTGAAACGGTATAAAGTGGACGCCACGAAAAAACT |
| | | GAAACGGTTAGCAGAAAAACCGGATGGTGTTCAAAGCGGCCGACTGGCGGATGAACTGGCCCGGGATATATTA |
| | | TGGCTGCAACCAAGCTCTCCTAAAGAAGGCGGTAAAGATAAACTTACCGGCGCCAATTTTCAAGCATTACAGTA |
| | | TGCACTGGCCCGTTATGATTTCATGCGCACCGAATTACCAAGAATATTAACCGCGGCGCGTCTGACGGGATCAA |
| | | ATAATGCGCATCCTTTTTTAGATAAGATTAATCCACAGGACTATAGCCGCCTCACAGCATATTACGCAGGCTATT |
| | | TGACGCAGAAAATTGTCTACATAGATAAGCAATTAGAAAAACTGGCTAGAGGGAAGGTTAACATCCAATTTCAC |
| | | CCGACGCGCAAACTTATTCGCCAGTCTCAAACAGATTCAGTGGAACATGAAAAGGAAACCGTCTTTTTACCACG |
| | | TAATATTTTTACCGAGAAAATTGAACAGGCCCTGTGCCAAATACAGGGCAATTTTAAACTTAATATTGAAAAAG |
| | | CCCGTATAAGCGGCAAGAAGCTGAACGCTTCTAAACTCATATTGATCTACCTGGAATTATATCTTAAGGATGAA |
| | | GTGCCTGAATTTTACAATGCTAAAAGAAAGTACCCCTGTCTGTGTTATCCACTGACCCCGAGCGAAAAATATACT |
| | | CTGAAGGAGTATCAGGACACAGAGGAACGGTCGAAGCGCATTGACCGTCTCAAATGTTTTTACAATTTTAAAGA |
| | | GGTAGCAGAAAAAGTCTATCTTCACAAGGAACTTAGCGAGGACGAAAACAAACGCTACAGAAAGTATATAGAG |
| | | GTTCAGAAAGTGATCGATAATGAAAAAATCATTAGACTGCGAAAAGTGCAGGATATTACGCTTTATCTTTGGAC |
| | | ACGTCTGTTCATTGAGGAAAATCCTGAGCAAATCTTTTTCAGTAAGAACGAAAAACCAGAGAACAGTCTGTTCA |
| | | AATTGCGGGAAATGAATAATGCCATACTTGACAATACCACGTCACGGAAAATTAATATTAACACTCCTAACGGT |
| | | AATGTAAGCATTGAAGACGAGTTTAAAATTAAAGATTATGGTCGCGTAACGGCACTGACAACCGAGAAGTTGCC |
| | | CCAATCTTTAATAAAGTTCATAGCGATTCTCAACAAACCCTTAAACAAAAAAGATCGCCCGTTATTGTCTTATGA |
| | | TTATATCTACCACGAGACAAATGCATTCTACCGCTACCGTCCGGAAATTATCAAAATGGCGCAGGACATTGAAA |
| | | ACAAAATCATCAACGACCTTAAGATTAATGTAAAACCACAAGCCGAATCCTACTACAACTTTCGTCGCACCATC |
| | | CAGAAGCTCGAGAACAAAAGTCGCGACATCAACATCGAATTGTTAATTAAAATCCGTAATGCATTCTGCCATAA |
| | | CGAGTATAAGGAATTAGACAACGACCAATACAAGTACCTGAATTCATTGTTTAAACTGTCGTCCGACATAAAAC |
| | | AGACTGATACACTGGCGTATTTGTTATACATTTTGTTCGAGACTGAGTACCAGAAAGTGATGATACTGAAATAA |
| 372 | JW13197 | ATGGCAAATACGCAGTTCAAACTGAAGTCTGTTGATTATTCAAAACCGTACGATGAACAGCCCGAATGCAAACG |
| | | GCATGTAGTGGGAGCCTATGCCAATCTGGCCCGACATAATATGACCCTGACTGTGAATACGATTATGCAAGCCA |
| | | TTGGGATGGAAATATTCGATGAAAACAATATTGGAGACGCGTTTAATAGTAGTCACCGTAAAAAGATCGACGCT |
| | | CTGGATAACATTCAAAAAGTGAATCTGCAGAAGCGGTTGTACCGTCATTTCCCCTTTTTTAAACGCATGAAACTC |
| | | GAAGATGAAGACAAAAAGTCGGTGCAGTTAACTACACTGTTAGAGGTTATGAGCGACTTCACATCATGCATGGC |
| | | GATTATACGTAATTTTTACACACATTATCACCCATATAATTCACCGGATGAGAAAAAAAGACAGCTGGAATTAA |
| | | AGAAACGAATGGGCAAACGCTTACAGTTTCTTTATGAAAATACATCCCAAATGTTCAAAACTACTGAAGCACTT |
| | | GACCATGAAAGTAATGAAGTGTTGTCCGCCCTGCGCATTCCCGAAGATTACATTGAGGAAATTTTACCGGGCGA |
| | | CAAAGAATACGACAATTTGTTTAACCTTATCAATGATCCTCGGACGAGTAAGTTCAAAAAGCAAGGCTTGAAAC |
| | | TCAACCAGCAGACCAAAGTGATTACTCGTAAAAAAGTTCGATTTGTACGTAATCCTGACTATCAGGCCTACATG |
| | | ATTGATGAGACAAATGGCATGAGCGACGTAGCAATTATATTCTTTCTGTGTCTTTTTCTGGACAAAAAGGTCTCC |
| | | TTCGATATGATGGACGAAGTGGGCTTCACGAAACAGATAAAGTTTAACGGTCCGCAGGCTGATCGTCAGCTGTT |
| | | GTATCTGAAAGAGATAATGTGTATGAACAGAATCCGTATGACCAAAGCAAAACTTGATAGCGAAATGACAGAT |
| | | ACGGCCCTGGCACTCGATATGCTCGGGGAAGTTCGAAAGTGCCCAAAAGCGTTGTATGAGGTATTAGATAAAGA |
| | | TGCACGGAATGAATTCAAAGATGACGCGACGGTTCAATGGGAAACGGAACACGGTAAAGAAGCGGTTTCGACT |
| | | GAAGCGCTCGCTTCTGAATCTGATGAAGACGAGTTAACCGACAAAAATACACCGCGCTCAACATTTGTTCGTTG |
| | | GGATGATCGTTTTCCTCAAATGGCCTTACGTTATATTGATTATCAGGGTCTTTTCAATGACATACGCTTTCAGTTG |
| | | AACCTGGGTAAGTATCGTTTCGCCTTTTACCAGCATGATAACAAACAGTCTGTTGATAACGAGGAAAGATTAAG |
| | | AATATTACAGAAAGAGTTACATGGGTTTGGACGCATCCAGGAAGTAGAAGAAAAAAAGAATGAGAAGTGGAAA |
| | | GAACTGTATGACGAAAAGACCGTGAAAGATGGCTTAACACAGAAAAAACCGGATGAGGCCGGTCAGGCCCCGT |
| | | ATATCACTGAGCAGTATGCACAATATGCTATTGATGAGAAATCTCACTCGATTGGTCTGCGTTGGGAAGGGTGG |
| | | GATAAAAAAGATAAGAGTAAAGGCCACTATGGTGATCTGGACAAACTGAAGATGTTTATTCCATATATCCCGAG |
| | | CAAACCTAAAGACGAAGAGCAGCAAACTAATCAGGCGGAAGATCTGATGGCTCCACAAGCCATGCTGAACCTG |
| | | TATGAACTTCCCGCTTTACTGTTTTATCAGTACCTGCTTGATAAGTACAAGTCAGATACCAGCGATGCGGAAGAC |
| | | ATAATTAAAACAAGCTTCACTAATCTGGTTAATTTTTTCAACGACGTCGAATCTGATGTCCTGGTTCCTATCGAT |
| | | GATCCTGATGAAAACGAACGCATTGATAAACTGAGTTCCTTACTCGAGGGCTATAATCTTCAGATGAGCGATAT |
| | | ACCGGAGAAGTTGCGTAACTACCTTTGCAACAAGGATATTGACTATGATCTCAAAATGGAGAAAAGCGCTATTG |
| | | GTCGGTTAGAGGAGAAGAAAAAGCAAGTTGACAAAGCGCTTTCTAGTTATAAGGACAAGAAAAAGATAATTGG |
| | | TTCAAAAGATAACAAGTTTGACAAAATGCGTGCGTCTATTAAAACGGGACAGCTGGCAACCTGGTTAATACGTG |
| | | ATATTATGGATTGGGTTCCAAATAACTCCTCAGCACGCAATCGACTGACTGGACAAAACTATACCGCTTTGCAA |
| | | GCCACAATGGCTCTCTTTGGCCAGCAAGCGAATAGCAACAGAAGTTATCTTGAATCCTGTTTTCGTTCCGCTCAT |
| | | CTTCTGCCATTAGACGGTAAACCTTATGATAAAAACACGCATCATCCGTTTCTCGAAGATGTGATTCAGGCGATG |
| | | GAAGACGAAACCTTAGAGTCGTTCTACGAGAAATACCTTGATTTTGAGACCAAACACATCGATAAAGTGATTAA |
| | | AACTCTCGAGAACGGGACAGATTTTGATGATTATTATAAAGTGCCTTTTTTGCATTGTGATCGTCAACGCTGGGC |
| | | AGGTCCCGACAAAAGTTTGGCCGCGCAGTATCTTAAACGACCGATTCAGCTCCCAAATGGGATTTTTACCAAGC |
| | | CCGTTTTTAATCTGCTGTCTACGATCGATAACAAAGCCTTAAGAAAAGCACTCGAGGAATCCCAGCAGGCCAAT |
| | | GGAGAAAATCCGCCGCTGGCAAATAACGTCGCGTTTCTGATGAAACTGTACTTTGAGTTCGTTGAGCATGATCA |
| | | TTCCCAACCGTTTTATTATACCACGACGTCAGACGGCAACAAAAGCCACTATCTTCATATCTACCGCATCTTCAA |
| | | AAAGTTGTACGGCCAACCAATACCACACTCAAACAAAACCACTGTACCGGCGTATACAATTGACGAAATCCGCC |
| | | ATCTGCGTAAACAGGCGATAGCAGACATCGAAGAGTATGTAGACAATGAAATCGAGAAATGGAAACGTACCAA |
| | | ACAAGACAGATTCGAATCCAAGCTGCGGAAAAAGCTGAAGAAAGAAAATGATAAGCGCTACAAAAAGCATGA |
| | | AAAGCAGCTGAACATCAACGAGGAGATCCAGAAAGTTGTGAAAAAAGAAATAGATACCATGCGCACAGATATG |
| | | ACTAGCAAAATGAAACGTCAACTGCGGTCTGTATATGATAACGAACGGACAATTAGACGGTTTAAAGCTCAGGA |
| | | CATGATGCTTTTAGTAATGGCACGGAATATCTTAAAAGCCAAGAGTAACGATAAAGATTTTACGGACGGTTTTT |
| | | GTTTGGAGAACGTTTTCAGCGATTCGTTACTTGATAAACCCATTGACTTCGAATGGAAAGTCAATATCAAAGGTG |
| | | CTTCTAAGACAATCAAGCAGGAAGGCATGAAAATGAAAAACTATGGTCAGTTTTACAAATTTGCTTCAGATCAC |
| | | CAACGCTTGGAATCATTACTGTCACGCTTGCCAGACTCGCTGTTTCAGCGAGCAGAAATAGAGAATGAACTGGC |
| | | TTACTACGACTCGAATAGAAGTAAAGTCTTTCGGCAAGTCTATATCATTGAATCGGAAGCATATCGTCTGAAAC |
| | | CTGGCTTACAGGATGATGCCAATGCAAGCAAAGATTGGTTTTACTTTACGGACAAAAAAACCCATAAGCAACGT |
| | | AGTATCCGCAATAGCTTCATACAACTCCTGGAAATTCTGGCGGCAGGGGAAGATGGAATTTTGGATAACGATGA |
| | | GAAAATTGCTCTGCAGAAAACCCGCAATGCCTTTGGACACAATACTTATGATGTGGATCTGAATGTCGTCTTCAA |
| | | GGGTAAAGAAAATAAAAAGAAGATCCCTGAGGTGGCAAATGGGATCAAAGAGAAAATTGAGACCCAGACCGA |
| | | AGAATTAAAACGCCGTTCTAAATAA |

TABLE D
Target Sequences

| SEQ | | |
|---|---|---|
| ID | | |
| NO: | Name | Sequence |
| 373 | FluA_ | CUUGAGGCUCUCAUGGAAUGGCUAAAGACAAGACCAAUC |
| | Target | UUGUCACCUCUGACUAAGGGAAUUUUAGGAUUUGUGUUC |
| | | ACGCUCACCGUGCCCAGUGAGCGAGGACUGCAGCGUAGA |
| | | CGC |

TABLE E
Direct Repeat Sequences
Table E - Target Sequences

| SEQ ID NO: | Name | Sequence |
|---|---|---|
| 374 | JW13101_Direct_Repeats | GACUGAACCUUACCAUGUAGGGAAUUGAAC |
| 375 | JW13102_Direct_Repeats | GUUGUAGAAGCUCUUAUUUUGAAGGGUAUAACAACU |
| 376 | JW13103_Direct_Repeats | AUGCCUUAAUUUUGGAAGGUGAGAACAAC |
| 377 | JW13104_Direct_Repeats | GUUGUAACUGCCCUUAUUUUGAAGGGUAUAAACAAC |
| 378 | JW13105_Direct_Repeats | GCUGUAGAAGCCUCCGAUUUGUGAGGUGAUGACAGC |
| 379 | JW13106_Direct_Repeats | UAGUUUUAUUACCCCUACAAACAGGGUUAUAUUCUAAC |
| 380 | JW13107_Direct_Repeats | GUUGUAACUGCCCUUAUUUUGAUGGGUAAAAACAAC |
| 381 | JW13108_Direct_Repeats | GUUGUGCUUACCCUACAAAAUUA |
| 382 | JW13110_Direct_Repeats | GUUGUUGAAUGCUGCAUUUUGGGUAGCAAUUACAAC |
| 383 | JW13112_Direct_Repeats | AGUCCCCGCUCGUUUCGGGGUGGUCU |
| 384 | JW13113_Direct_Repeats | GUUGUUUUUAUUCUUCAAAAUAAGAGCAGUUACAA |
| 385 | JW13114_Direct_Repeats | GUUGUCUUUACCCUCCAAACCAAGAGCAUUCACAAC |
| 386 | JW13115_Direct_Repeats | GUUGUGGGUAUUCUGCAAAUUUAGGGCAAUAACAAA |
| 387 | JW13116_Direct_Repeats | CGAAUUCCGAAUUAACCUCGUGUAGUGACGUCGUUC |
| 388 | JW13117_Direct_Repeats | GUUGUUUUCACCUUGCAAAUAUAAGGCAUUUACAAC |
| 389 | JW13118_Direct_Repeats | GUUGUAACUGCUCUUGUUUUGAAGGGUAAACACAAC |
| 390 | JW13119_Direct_Repeats | UGCUCUCAGUUUUGGAGGGUAAACACAAC |
| 391 | JW13120_Direct_Repeats | AUGCCUUAAUUUUGGAAGGUGAAAACAAC |
| 392 | JW13121_Direct_Repeats | GCUGUACCUACCCUGCAAAUCAGGAGCCUCUACAGC |
| 393 | JW13122_Direct_Repeats | AAGUUGUCAUACCCCUCCCAACGAGGGGCUUCUACAAC |
| 394 | JW13123_Direct_Repeats | GUUGUAGCAACCUAUAUUUUGUUAGGAAAAGACAAC |
| 395 | JW13124_Direct_Repeats | GGACUACACCCUUACCGUUGUGUAGGGGUCUAAAAC |
| 396 | JW13125_Direct_Repeats | GUUCAGCAUGACCGCUUCUUUUACAGCGGACUGAACC |
| 397 | JW13126_Direct_Repeats | GUUGUAACUGCUCUUGUUUUGAAGGGUAAACACAAC |
| 398 | JW13127_Direct_Repeats | UUCAAAAUAAGGGCAGUUACAAC |
| 399 | JW13128_Direct_Repeats | GUCUAAGACUAGGUAAGAAUUAGCGGUGUCCAUUGC |
| 400 | JW13129_Direct_Repeats | GCUGGAGCAGCCCUCGAUUUGCAGGGUAAUCACAGC |
| 401 | JW13130_Direct_Repeats | GUUGUAACUGCCCUUAUUUUGAAGGGUAUAAACAAC |
| 402 | JW13131_Direct_Repeats | GUUGUGUGUAACCUAAAAAAUGAGGGCAAUAACAAC |
| 403 | JW13132_Direct_Repeats | GCUGUAGAAGCCUCCGAUUUGUGAGGUGAUGACAGC |
| 404 | JW13133_Direct_Repeats | GUUGUAACUGCCCUUAUUUUGAUGGGUAAAAACAAC |
| 405 | JW13134_Direct_Repeats | GCUGGAGCAGCCCUCGAUUUGCAGGGUAAUCACAGC |
| 406 | JW13135_Direct_Repeats | GUUGUUCUCACCUUGCAAAUAAUAAGGCAUAUACA |
| 407 | JW13136_Direct_Repeats | GGUGUACCUGCCAUGCAAAUAGAUGGCUUUCACACC |
| 408 | JW13137_Direct_Repeats | GCUGUAAUCACCCCGCAAAACCAGGGUUGCUUCAGC |
| 409 | JW13138_Direct_Repeats | GUUGUCUUUACUCCACAAACUAAGAGCAUUCACAAC |
| 410 | JW13139_Direct_Repeats | GGUGUUUUAAUCUUUCCAACUAAAGACUUUUACACC |
| 411 | JW13140_Direct_Repeats | CCUUCUUUUUGAAAGGCACAAAUACC |
| 412 | JW13141_Direct_Repeats | GUUGUUUUCACCUUGCAAAUAUAAGGCAUUUACAAC |
| 413 | JW13142_Direct_Repeats | GUUGUUUUUACCCUUCAGAAUAAGAGCAGU |
| 414 | JW13143_Direct_Repeats | ACGUUGUCAUACCCCUCCUAACGAGGGGCUUCUACAAC |
| 415 | JW13144_Direct_Repeats | GUUGUGAAUGCCAUAUUUUUGAAAGGUAGAAACAAC |
| 416 | JW13145_Direct_Repeats | GUUGUAGCAACCUAUAUUUUGUUAGGAAAAGACAAC |
| 417 | JW13146_Direct_Repeats | GUUGUUGAAUGCUGCAUUUUGGGUAGCAAUUACAAC |
| 418 | JW13147_Direct_Repeats | GCUGUACCUACCCUGCAAAUCAGGAGCCUCUACAGC |
| 419 | JW13148_Direct_Repeats | UAGUUUUAUUACCCCUACAAACAGGGUUAUAUUCUAAC |
| 420 | JW13149_Direct_Repeats | UGCUCUCAGUUUUGGAGGGUAAACACAAC |
| 421 | JW13150_Direct_Repeats | GUCAUAGACCCCUUCAAUUUAUGAGGGGUUUUGUUC |
| 422 | JW13153_Direct_Repeats | GUUGUGGAAGCCCUCAUUUUGAGAGGGUAUUACAAC |
| 423 | JW13154_Direct_Repeats | GUUGUGCUUACCCUUAAAACUAAGGGCAGCUACAAC |
| 424 | JW13155_Direct_Repeats | GUUGUAAGUGACCUCAUUUUGGAAGGUAAAAACAAC |
| 425 | JW13156_Direct_Repeats | GUUGUGUAUAUCUCCCAAAUCAGAGACAGCUACAAC |
| 426 | JW13157_Direct_Repeats | GUUGUUUAUACCUUACAAAAUAAAGGCUCUCACAAC |
| 427 | JW13158_Direct_Repeats | CCUUUGGAGUACUGUUAUUUAACAGGGUUCUAAAAC |
| 428 | JW13159_Direct_Repeats | GUUGUCGAAAGCCUUAUUUUGAAGGGCUAUUACAAC |
| 429 | JW13160_Direct_Repeats | AUGACUAUACCAGCAAUGGCUGGAUUAAAAC |
| 430 | JW13161_Direct_Repeats | GCUGUAGAGGCCCCCGUUUUAGGGGGUAGGUACAGC |
| 431 | JW13162_Direct_Repeats | GCUGUUACUGCCCCACAAAUCGAGGCCUAUCACAGC |
| 432 | JW13163_Direct_Repeats | GCUGUAGAGGCCCCCGAUUU |
| 433 | JW13164_Direct_Repeats | GUUGUGCCUACCUCUCAAAUAUAGGGCUUUCACAA |
| 434 | JW13165_Direct_Repeats | GUUGUAAAUACCCUACAAAU |
| 435 | JW13166_Direct_Repeats | GAACUAUAGUAGUGUAAAUUUACACUACUCUAAAAC |
| 436 | JW13167_Direct_Repeats | GCUGUUAUAUCCUUACCUUUGUAAGGGAAGUACAGC |
| 437 | JW13168_Direct_Repeats | GUUGUAGUUCCCUUUUAUUUAGGGAUGGUGUUCAGC |
| 438 | JW13169_Direct_Repeats | GUUGUAAAAUCUCUCGUUUUGGAGAGGAUUAACAAC |
| 439 | JW13170_Direct_Repeats | GUUGUAGAAGCCUGUCGUUUGGAUGGGUAU |
| 440 | JW13171_Direct_Repeats | GUUGUCAUACCUACCCAAACGAUAGGCUUCUACAACU |
| 441 | JW13172_Direct_Repeats | CUUAUACAACACCCAUUUUCACAGUGGGUCUAUAAC |
| 442 | JW13173_Direct_Repeats | GUUGUCAUACCGCUCCGAAUGAACGGCUUCUACAAC |
| 443 | JW13174_Direct_Repeats | GUUGUCAUACCGCCCCGAAUGAGCGGCUUCUACAAU |
| 444 | JW13175_Direct_Repeats | GCUGUCAUUACCCUCCAAAACGAGGGCUUCUACAGC |
| 445 | JW13176_Direct_Repeats | GUUUCAGAACCCCGUAAUUCUACGGGGUUGUAGUUG |
| 446 | JW13177_Direct_Repeats | GUUUUAGACCCCUGUGAUUCAGGGGUGUAGUGAAACU |
| 447 | JW13178_Direct_Repeats | GUUUUAAGACUGUGCAAAUUCGCAUAGCUUUCAAUC |
| 448 | JW13179_Direct_Repeats | GUUGUAGAAGCCUGUCGUUUGGAUGGGUAUAACAAC |
| 449 | JW13180_Direct_Repeats | GUUGUCAUACCCACUCAAAUUGUGGGCUUCUACAAC |
| 450 | JW13181_Direct_Repeats | GUUUCCAUACCCACUCAAAUGCGGGCUUCUGAAAC |
| 451 | JW13182_Direct_Repeats | GUUGUGUGUGCCUUUCAAAUUGAAGGCGUUCCCAAC |
| 452 | JW13183_Direct_Repeats | GCUGUACUUACCAUACAAAUUUAUGGCUUUUACAGC |
| 453 | JW13184_Direct_Repeats | GUGCGAGACCAUCCCCAAAUGAAGGGGAACUACACC |
| 454 | JW13185_Direct_Repeats | GGUGUAGUUCCCAUUUAGUUGGGGAUGUUCUCCCGC |
| 455 | JW13186_Direct_Repeats | GGUGCAGUUCCCCUUCAUUUGGGGAUGGUGUUGAGC |
| 456 | JW13187_Direct_Repeats | UGCUGUAACAGCCCUGAUUUUGCAGGGUAAAUACAGUC |
| 457 | JW13188_Direct_Repeats | CAAAAUGGAGACUUCAUCAGC |
| 458 | JW13189_Direct_Repeats | ACCUCUCAAAAUGAGGCCUUCAACAAC |
| 459 | JW13190_Direct_Repeats | GUUGUAGAAGCUUAUCGUUUGGAUAGGUAUGACAAC |
| 460 | JW13191_Direct_Repeats | AAGACUGGUAUAUGAACCAGGGAGACAACA |
| 461 | JW13192_Direct_Repeats | GUUGUCAUGCCGAUCCUAACGACAGGCUUCUACAAC |
| 462 | JW13193_Direct_Repeats | GUUGUAAAGACCUGCACUUUAGUAGGAAGAAACAAC |
| 463 | JW13194_Direct_Repeats | GUUGUAGAAGCCGUUCAUUCGGAGCGGUAUGACAAC |
| 464 | JW13195_Direct_Repeats | GUACUACACCCAUUUUGCAUGGGUCUAAAAC |
| 465 | JW13196_Direct_Repeats | GUUGUCUUUUCCUAACAAAAUAUAGGUUGCUACAAC |
| 466 | JW13197_Direct_Repeats | GUUGUAGAAGCCGCUCAUUCGGGGCGGUAUGACAAC |

1. A reaction mixture comprising:
(a) a nucleic acid-guided CRISPR nuclease (CRISPR nuclease) having at least 85% amino acid homology to any one of SEQ ID NO:62, SEQ ID NO:22, SEQ ID NO:80, SEQ ID NO:91, SEQ ID NOs:1-21, SEQ ID NOs: 23-61, SEQ ID NOs:63-79; SEQ ID NOs:81-90, and SEQ ID NOs:92-93;
(b) a guide nucleic acid (gRNA) for complexing with the nucleic acid-guided CRISPR nuclease, thereby providing a complex comprising a nucleic acid-guided CRISPR nuclease/gRNA pair, wherein the gRNA comprises a direct repeat sequence having at least 85% homology to any one of SEQ ID NOs: 374-466; and
(c) a substrate for the complex optionally, wherein the reaction mixture is in solution, further optionally wherein the solution comprises a buffer that supports optimal pH and ionic conditions for the reaction.

2. (canceled)

3. The reaction mixture of claim 1, wherein the nucleic acid-guided CRISPR nuclease has at least 95% amino acid homology to any one of SEQ ID NOs:1-93.

4. (canceled)

5. The reaction mixture of claim 1, wherein the nucleic acid-guided CRISPR nuclease and the guide nucleic acid comprise a nucleic acid-guided CRISPR nuclease/gRNA pair selected from the group consisting of:
a. the CRISPR nuclease/direct repeat pair of SEQ ID NO:22/SEQ ID NO: 395
b. the CRISPR nuclease/direct repeat pair of SEQ ID NO:62/SEQ ID NO: 435
c. the CRISPR nuclease/direct repeat pair of SEQ ID NO:80/SEQ ID NO: 453
d. the CRISPR nuclease/direct repeat pair of SEQ ID NO:91/SEQ ID NO: 464.

6. The reaction mixture of claim 1, wherein the nucleic acid-guided CRISPR nuclease and the guide nucleic acid comprise a nucleic acid-guided CRISPR nuclease/gRNA pair selected from the group consisting of:
e. the CRISPR nuclease/gRNA pair of SEQ ID NO:1/SEQ ID NO: 94 or the CRISPR nuclease/gRNA pair of SEQ ID NO:1/SEQ ID NO: 117;
f. the CRISPR nuclease/gRNA pair of SEQ ID NO:2/SEQ ID NO: 95 or the CRISPR nuclease/gRNA pair of SEQ ID NO:2/SEQ ID NO: 118;
g. the CRISPR nuclease/gRNA pair of SEQ ID NO:3/SEQ ID NO: 96 or the CRISPR nuclease/gRNA pair of SEQ ID NO:3/SEQ ID NO: 119;
h. the CRISPR nuclease/gRNA pair of SEQ ID NO:4/SEQ ID NO: 97 or the CRISPR nuclease/gRNA pair of SEQ ID NO:4/SEQ ID NO: 120;
i. the CRISPR nuclease/gRNA pair of SEQ ID NO:5/SEQ ID NO: 98 or the CRISPR nuclease/gRNA pair of SEQ ID NO:5/SEQ ID NO: 121;
j. the CRISPR nuclease/gRNA pair of SEQ ID NO:6/SEQ ID NO: 99 or the CRISPR nuclease/gRNA pair of SEQ ID NO:6/SEQ ID NO: 122;
k. the CRISPR nuclease/gRNA pair of SEQ ID NO:7/SEQ ID NO: 100 or the CRISPR nuclease/gRNA pair of SEQ ID NO:7/SEQ ID NO: 123;
l. the CRISPR nuclease/gRNA pair of SEQ ID NO:8/SEQ ID NO: 101 or the CRISPR nuclease/gRNA pair of SEQ ID NO:8/SEQ ID NO: 124;
m. the CRISPR nuclease/gRNA pair of SEQ ID NO:9/SEQ ID NO: 102 or the CRISPR nuclease/gRNA pair of SEQ ID NO:9/SEQ ID NO: 125;
n. the CRISPR nuclease/gRNA pair of SEQ ID NO:10/SEQ ID NO: 103 or the CRISPR nuclease/gRNA pair of SEQ ID NO:10/SEQ ID NO: 126;
o. the CRISPR nuclease/gRNA pair of SEQ ID NO:11/SEQ ID NO: 104 or the CRISPR nuclease/gRNA pair of SEQ ID NO:11/SEQ ID NO: 127;
p. the CRISPR nuclease/gRNA pair of SEQ ID NO:12/SEQ ID NO: 105 or the CRISPR nuclease/gRNA pair of SEQ ID NO:12/SEQ ID NO: 128;
q. the CRISPR nuclease/gRNA pair of SEQ ID NO:13/SEQ ID NO: 106 or the CRISPR nuclease/gRNA pair of SEQ ID NO:13/SEQ ID NO: 129;
r. the CRISPR nuclease/gRNA pair of SEQ ID NO:14/SEQ ID NO: 107 or the CRISPR nuclease/gRNA pair of SEQ ID NO:14/SEQ ID NO: 130;
s. the CRISPR nuclease/gRNA pair of SEQ ID NO:15/SEQ ID NO: 108 or the CRISPR nuclease/gRNA pair of SEQ ID NO:15/SEQ ID NO: 131;
t. the CRISPR nuclease/gRNA pair of SEQ ID NO:16/SEQ ID NO: 109 or the CRISPR nuclease/gRNA pair of SEQ ID NO:16/SEQ ID NO: 132;
u. the CRISPR nuclease/gRNA pair of SEQ ID NO:17/SEQ ID NO: 110 or the CRISPR nuclease/gRNA pair of SEQ ID NO:17/SEQ ID NO: 133;
v. the CRISPR nuclease/gRNA pair of SEQ ID NO:18/SEQ ID NO: 111 or the CRISPR nuclease/gRNA pair of SEQ ID NO:18/SEQ ID NO: 134;
w. the CRISPR nuclease/gRNA pair of SEQ ID NO:19/SEQ ID NO: 112 or the CRISPR nuclease/gRNA pair of SEQ ID NO:19/SEQ ID NO: 135;
x. the CRISPR nuclease/gRNA pair of SEQ ID NO:20/SEQ ID NO: 113 or the CRISPR nuclease/gRNA pair of SEQ ID NO:20/SEQ ID NO: 136;
y. the CRISPR nuclease/gRNA pair of SEQ ID NO:21/SEQ ID NO: 114 or the CRISPR nuclease/gRNA pair of SEQ ID NO:21/SEQ ID NO: 137;
z. the CRISPR nuclease/gRNA pair of SEQ ID NO:22/SEQ ID NO: 115 or the CRISPR nuclease/gRNA pair of SEQ ID NO:22/SEQ ID NO: 138;
aa. the CRISPR nuclease/gRNA pair of SEQ ID NO:23/SEQ ID NO: 116 or the CRISPR nuclease/gRNA pair of SEQ ID NO:23/SEQ ID NO: 139;
bb. the CRISPR nuclease/gRNA pair of SEQ ID NO:24/SEQ ID NO: 140 or the CRISPR nuclease/gRNA pair of SEQ ID NO:24/SEQ ID NO: 164;
cc. the CRISPR nuclease/gRNA pair of SEQ ID NO:25/SEQ ID NO: 141 or the CRISPR nuclease/gRNA pair of SEQ ID NO:25/SEQ ID NO: 165;
dd. the CRISPR nuclease/gRNA pair of SEQ ID NO:26/SEQ ID NO: 142 or the CRISPR nuclease/gRNA pair of SEQ ID NO:26/SEQ ID NO: 166;
ee. the CRISPR nuclease/gRNA pair of SEQ ID NO:27/SEQ ID NO: 143 or the CRISPR nuclease/gRNA pair of SEQ ID NO:27/SEQ ID NO: 167;
ff. the CRISPR nuclease/gRNA pair of SEQ ID NO:28/SEQ ID NO: 144 or the CRISPR nuclease/gRNA pair of SEQ ID NO:28/SEQ ID NO: 168;
gg. the CRISPR nuclease/gRNA pair of SEQ ID NO:29/SEQ ID NO: 145 or the CRISPR nuclease/gRNA pair of SEQ ID NO:29/SEQ ID NO: 169;
hh. the CRISPR nuclease/gRNA pair of SEQ ID NO:30/SEQ ID NO: 146 or the CRISPR nuclease/gRNA pair of SEQ ID NO:30/SEQ ID NO: 170;
ii. the CRISPR nuclease/gRNA pair of SEQ ID NO:31/SEQ ID NO: 147 or the CRISPR nuclease/gRNA pair of SEQ ID NO:31/SEQ ID NO: 171;
jj. the CRISPR nuclease/gRNA pair of SEQ ID NO:32/SEQ ID NO: 148 or the CRISPR nuclease/gRNA pair of SEQ ID NO:32/SEQ ID NO: 172;
kk. the CRISPR nuclease/gRNA pair of SEQ ID NO:33/SEQ ID NO: 149 or the CRISPR nuclease/gRNA pair of SEQ ID NO:33/SEQ ID NO: 173;
ll. the CRISPR nuclease/gRNA pair of SEQ ID NO:34/SEQ ID NO: 150 or the CRISPR nuclease/gRNA pair of SEQ ID NO:34/SEQ ID NO: 174;
mm. the CRISPR nuclease/gRNA pair of SEQ ID NO:35/SEQ ID NO: 151 or the CRISPR nuclease/gRNA pair of SEQ ID NO:35/SEQ ID NO: 175;
nn. the CRISPR nuclease/gRNA pair of SEQ ID NO:36/SEQ ID NO: 152 or the CRISPR nuclease/gRNA pair of SEQ ID NO:36/SEQ ID NO: 176;
oo. the CRISPR nuclease/gRNA pair of SEQ ID NO:37/SEQ ID NO: 153 or the CRISPR nuclease/gRNA pair of SEQ ID NO:37/SEQ ID NO: 177;
pp. the CRISPR nuclease/gRNA pair of SEQ ID NO:38/SEQ ID NO: 154 or the CRISPR nuclease/gRNA pair of SEQ ID NO:38/SEQ ID NO: 178;
qq. the CRISPR nuclease/gRNA pair of SEQ ID NO:39/SEQ ID NO: 155 or the CRISPR nuclease/gRNA pair of SEQ ID NO:39/SEQ ID NO: 179;
rr. the CRISPR nuclease/gRNA pair of SEQ ID NO:40/SEQ ID NO: 156 or the CRISPR nuclease/gRNA pair of SEQ ID NO:40/SEQ ID NO: 180;
ss. the CRISPR nuclease/gRNA pair of SEQ ID NO:41/SEQ ID NO: 157 or the CRISPR nuclease/gRNA pair of SEQ ID NO:41/SEQ ID NO: 181;
tt. the CRISPR nuclease/gRNA pair of SEQ ID NO:42/SEQ ID NO: 158 or the CRISPR nuclease/gRNA pair of SEQ ID NO:42/SEQ ID NO: 182;
uu. the CRISPR nuclease/gRNA pair of SEQ ID NO:43/SEQ ID NO: 159 or the CRISPR nuclease/gRNA pair of SEQ ID NO:43/SEQ ID NO: 183;
vv. the CRISPR nuclease/gRNA pair of SEQ ID NO:44/SEQ ID NO: 160 or the CRISPR nuclease/gRNA pair of SEQ ID NO:44/SEQ ID NO: 184;
ww. the CRISPR nuclease/gRNA pair of SEQ ID NO:45/SEQ ID NO: 161 or the CRISPR nuclease/gRNA pair of SEQ ID NO:45/SEQ ID NO: 185;
xx. the CRISPR nuclease/gRNA pair of SEQ ID NO:46/SEQ ID NO: 162 or the CRISPR nuclease/gRNA pair of SEQ ID NO:46/SEQ ID NO: 186;
yy. the CRISPR nuclease/gRNA pair of SEQ ID NO:47/SEQ ID NO: 163 or the CRISPR nuclease/gRNA pair of SEQ ID NO:47/SEQ ID NO: 187;
zz. the CRISPR nuclease/gRNA pair of SEQ ID NO:48/SEQ ID NO: 188 or the CRISPR nuclease/gRNA pair of SEQ ID NO:48/SEQ ID NO: 234;
aaa. the CRISPR nuclease/gRNA pair of SEQ ID NO:49/SEQ ID NO: 189 or the CRISPR nuclease/gRNA pair of SEQ ID NO:49/SEQ ID NO: 235;
bbb. the CRISPR nuclease/gRNA pair of SEQ ID NO:50/SEQ ID NO: 190 or the CRISPR nuclease/gRNA pair of SEQ ID NO:50/SEQ ID NO: 236;
ccc. the CRISPR nuclease/gRNA pair of SEQ ID NO:51/SEQ ID NO: 191 or the CRISPR nuclease/gRNA pair of SEQ ID NO:51/SEQ ID NO: 237;
ddd. the CRISPR nuclease/gRNA pair of SEQ ID NO:52/SEQ ID NO: 192 or the CRISPR nuclease/gRNA pair of SEQ ID NO:52/SEQ ID NO: 238;
eee. the CRISPR nuclease/gRNA pair of SEQ ID NO:53/SEQ ID NO: 193 or the CRISPR nuclease/gRNA pair of SEQ ID NO:53/SEQ ID NO: 239;
fff. the CRISPR nuclease/gRNA pair of SEQ ID NO:54/SEQ ID NO: 194 or the CRISPR nuclease/gRNA pair of SEQ ID NO:54/SEQ ID NO: 240;
ggg. the CRISPR nuclease/gRNA pair of SEQ ID NO:55/SEQ ID NO: 195 or the CRISPR nuclease/gRNA pair of SEQ ID NO:55/SEQ ID NO: 241;
hhh. the CRISPR nuclease/gRNA pair of SEQ ID NO:56/SEQ ID NO: 196 or the CRISPR nuclease/gRNA pair of SEQ ID NO:56/SEQ ID NO: 242;
iii. the CRISPR nuclease/gRNA pair of SEQ ID NO:57/SEQ ID NO: 197 or the CRISPR nuclease/gRNA pair of SEQ ID NO:57/SEQ ID NO: 243;
jjj. the CRISPR nuclease/gRNA pair of SEQ ID NO:58/SEQ ID NO: 198 or the CRISPR nuclease/gRNA pair of SEQ ID NO:58/SEQ ID NO: 244;
kkk. the CRISPR nuclease/gRNA pair of SEQ ID NO:59/SEQ ID NO: 199 or the CRISPR nuclease/gRNA pair of SEQ ID NO:59/SEQ ID NO: 245;
lll. the CRISPR nuclease/gRNA pair of SEQ ID NO:60/SEQ ID NO: 200 or the CRISPR nuclease/gRNA pair of SEQ ID NO:60/SEQ ID NO: 246;
mmm. the CRISPR nuclease/gRNA pair of SEQ ID NO:61/SEQ ID NO: 201 or the CRISPR nuclease/gRNA pair of SEQ ID NO:61/SEQ ID NO: 247;
nnn. the CRISPR nuclease/gRNA pair of SEQ ID NO:62/SEQ ID NO: 202 or the CRISPR nuclease/gRNA pair of SEQ ID NO:62/SEQ ID NO: 248;
ooo. the CRISPR nuclease/gRNA pair of SEQ ID NO:63/SEQ ID NO: 203 or the CRISPR nuclease/gRNA pair of SEQ ID NO:63/SEQ ID NO: 249;
ppp. the CRISPR nuclease/gRNA pair of SEQ ID NO:64/SEQ ID NO: 204 or the CRISPR nuclease/gRNA pair of SEQ ID NO:64/SEQ ID NO: 250;
qqq. the CRISPR nuclease/gRNA pair of SEQ ID NO:65/SEQ ID NO: 205 or the CRISPR nuclease/gRNA pair of SEQ ID NO:65/SEQ ID NO: 251;
rrr. the CRISPR nuclease/gRNA pair of SEQ ID NO:66/SEQ ID NO: 206 or the CRISPR nuclease/gRNA pair of SEQ ID NO:66/SEQ ID NO: 252;
sss. the CRISPR nuclease/gRNA pair of SEQ ID NO:67/SEQ ID NO: 207 or the CRISPR nuclease/gRNA pair of SEQ ID NO:67/SEQ ID NO: 253;
ttt. the CRISPR nuclease/gRNA pair of SEQ ID NO:68/SEQ ID NO: 208 or the CRISPR nuclease/gRNA pair of SEQ ID NO:68/SEQ ID NO: 254;
uuu. the CRISPR nuclease/gRNA pair of SEQ ID NO:69/SEQ ID NO: 209 or the CRISPR nuclease/gRNA pair of SEQ ID NO:69/SEQ ID NO: 255;
vvv. the CRISPR nuclease/gRNA pair of SEQ ID NO:70/SEQ ID NO: 210 or the CRISPR nuclease/gRNA pair of SEQ ID NO:70/SEQ ID NO: 256;
www. the CRISPR nuclease/gRNA pair of SEQ ID NO:71/SEQ ID NO: 211 or the CRISPR nuclease/gRNA pair of SEQ ID NO:71/SEQ ID NO: 257;
xxx. the CRISPR nuclease/gRNA pair of SEQ ID NO:72/SEQ ID NO: 212 or the CRISPR nuclease/gRNA pair of SEQ ID NO:72/SEQ ID NO: 258;
yyy. the CRISPR nuclease/gRNA pair of SEQ ID NO:73/SEQ ID NO: 213 or the CRISPR nuclease/gRNA pair of SEQ ID NO:73/SEQ ID NO: 259;
zzz. the CRISPR nuclease/gRNA pair of SEQ ID NO:74/SEQ ID NO: 214 or the CRISPR nuclease/gRNA pair of SEQ ID NO:74/SEQ ID NO: 260;
aaaa. the CRISPR nuclease/gRNA pair of SEQ ID NO:75/SEQ ID NO: 215 or the CRISPR nuclease/gRNA pair of SEQ ID NO:75/SEQ ID NO: 261;
bbbb. the CRISPR nuclease/gRNA pair of SEQ ID NO:76/SEQ ID NO: 216 or the CRISPR nuclease/gRNA pair of SEQ ID NO:76/SEQ ID NO: 262;
cccc. the CRISPR nuclease/gRNA pair of SEQ ID NO:77/SEQ ID NO: 217 or the CRISPR nuclease/gRNA pair of SEQ ID NO:77/SEQ ID NO: 263;
dddd. the CRISPR nuclease/gRNA pair of SEQ ID NO:78/SEQ ID NO: 218 or the CRISPR nuclease/gRNA pair of SEQ ID NO:78/SEQ ID NO: 264;
eeee. the CRISPR nuclease/gRNA pair of SEQ ID NO:79/SEQ ID NO: 219 or the CRISPR nuclease/gRNA pair of SEQ ID NO:79/SEQ ID NO: 265;
ffff. the CRISPR nuclease/gRNA pair of SEQ ID NO:80/SEQ ID NO: 220 or the CRISPR nuclease/gRNA pair of SEQ ID NO:80/SEQ ID NO: 266;
gggg. the CRISPR nuclease/gRNA pair of SEQ ID NO:81/SEQ ID NO: 221 or the CRISPR nuclease/gRNA pair of SEQ ID NO:81/SEQ ID NO: 267;
hhhh. the CRISPR nuclease/gRNA pair of SEQ ID NO:82/SEQ ID NO: 222 or the CRISPR nuclease/gRNA pair of SEQ ID NO:82/SEQ ID NO: 268;
iiii. the CRISPR nuclease/gRNA pair of SEQ ID NO:83/SEQ ID NO: 223 or the CRISPR nuclease/gRNA pair of SEQ ID NO:83/SEQ ID NO: 269;
jjjj. the CRISPR nuclease/gRNA pair of SEQ ID NO:84/SEQ ID NO: 224 or the CRISPR nuclease/gRNA pair of SEQ ID NO:84/SEQ ID NO: 270;
kkkk. the CRISPR nuclease/gRNA pair of SEQ ID NO:85/SEQ ID NO: 225 or the CRISPR nuclease/gRNA pair of SEQ ID NO:85/SEQ ID NO: 271;
llll. the CRISPR nuclease/gRNA pair of SEQ ID NO:86/SEQ ID NO: 226 or the CRISPR nuclease/gRNA pair of SEQ ID NO:86/SEQ ID NO: 272;
mmmm. the CRISPR nuclease/gRNA pair of SEQ ID NO:87/SEQ ID NO: 227 or the CRISPR nuclease/gRNA pair of SEQ ID NO:87/SEQ ID NO: 273;
nnnn. the CRISPR nuclease/gRNA pair of SEQ ID NO:88/SEQ ID NO: 228 or the CRISPR nuclease/gRNA pair of SEQ ID NO:88/SEQ ID NO: 274;
oooo. the CRISPR nuclease/gRNA pair of SEQ ID NO:89/SEQ ID NO: 229 or the CRISPR nuclease/gRNA pair of SEQ ID NO:89/SEQ ID NO: 275;
pppp. the CRISPR nuclease/gRNA pair of SEQ ID NO:90/SEQ ID NO: 230 or the CRISPR nuclease/gRNA pair of SEQ ID NO:90/SEQ ID NO: 276;
qqqq. the CRISPR nuclease/gRNA pair of SEQ ID NO:91/SEQ ID NO: 231 or the CRISPR nuclease/gRNA pair of SEQ ID NO:91/SEQ ID NO: 277;
rrrr. the CRISPR nuclease/gRNA pair of SEQ ID NO:92/SEQ ID NO: 232 or the CRISPR nuclease/gRNA pair of SEQ ID NO:92/SEQ ID NO: 278;
ssss. the CRISPR nuclease/gRNA pair of SEQ ID NO:93/SEQ ID NO: 233 or the CRISPR nuclease/gRNA pair of SEQ ID NO:93/SEQ ID NO: 279.

7. The reaction mixture of claim 6, wherein the CRISPR nuclease/gRNA pair is SEQ ID NO:22/SEQ ID NO: 115 or the CRISPR nuclease/gRNA pair of SEQ ID NO:22/SEQ ID NO: 138.

8. The reaction mixture of claim 1, wherein the nucleic acid-guided CRISPR nuclease has trans-cleavage activity.

9. The reaction mixture of claim 1, wherein the nucleic acid-guided CRISPR nuclease hybridizes to a PAM region in a target nucleic acid sequence.

10. The reaction mixture of claim 1, wherein the substrate is a ribonucleic acid molecule (RNA) complexed with a fluorophore and a quencher for the fluorophore.

11. The reaction mixture of claim 10, wherein the reaction mixture is in solution, and wherein the substrate is present in the reaction mix in a concentration ranging from 250 nM to 450 nM.

12. The reaction mixture of claim 1, wherein the substrate is a ribonucleic acid molecule (RNA) complexed with biotin.

13. The reaction mixture of claim 1, wherein the substrate is a deoxyribonucleic acid (DNA) complexed with a fluorophore and a quencher for the fluorophore.

14. The reaction mixture of claim 1, wherein the reaction mixture further comprises a target nucleic acid sequence.

15. The reaction mixture of claim 14, wherein the target nucleic acid sequence is a sequence from an influenza A virus, an influenza B virus, a Respiratory Syncytial Virus (RSV), or a SARS-CoV-2 virus.

16. The reaction mixture of claim 15, wherein the target nucleic acid sequence is from an influenza A virus.

17. The reaction mixture of claim 16, wherein the target nucleic acid sequence is SEQ ID NO:373.

18. The reaction mixture of claim 15, wherein the target nucleic acid sequence activates cleavage of the substrate by the nucleic acid-guided CRISPR nuclease.

19.-42. (canceled)

43. A nucleic acid comprising a sequence having at least 95% identical to any one of SEQ ID NO:341, SEQ ID NO:301, SEQ ID NO:359, SEQ ID NO:370, SEQ ID NOs:280-300, SEQ ID NOs:302-340, SEQ ID NOs:342-358, SEQ ID NOs:360-369, and SEQ ID NOs:371-372, wherein the nucleic acid sequence encodes a nucleic acid-guided CRISPR nuclease comprising an amino acid sequence of any one of SEQ ID NOs:1-93 and, optionally further comprising a heterologous sequence optionally configured to facilitate the recombinant expression of the nucleic acid-guided CRISPR nuclease in an organism.

44.-45. (canceled)

46. An enzyme system comprising:
(a) a nucleic acid-guided CRISPR nuclease having at least 85% amino acid homology to any one of SEQ ID NO:62, SEQ ID NO:22, SEQ ID NO:80, SEQ ID NO:91, SEQ ID NOs:1-21, SEQ ID NOs:23-61, SEQ ID NOs:63-79, SEQ ID NOs:81-90, and SEQ ID NOs:92-93; and
(b) a guide nucleic acid (gRNA) for complexing with the nucleic acid-guided CRISPR nuclease, wherein the gRNA comprises a direct repeat sequence having at least 85% homology to any one of SEQ ID NOs: 374-466.

47.-66. (canceled)

67. A method of detecting a target nucleic acid, the method comprising:
(a) contacting a sample with a nucleic acid-guided nuclease system comprising:
a nucleic acid-guided CRISPR nuclease having at least 90% identity to SEQ ID NO:62, SEQ ID NO:22, SEQ ID NO:80, SEQ ID NO:91, SEQ ID NO:1-21, SEQ ID NOs: 23-61, SEQ ID NOs:63-79; SEQ ID NOs:81-90, and SEQ ID NOs:92-93, or a nucleic acid molecule encoding the nucleic acid-guided CRISPR nuclease;
a guide nucleic acid (gRNA) for complexing with the nucleic acid-guided CRISPR nuclease, or a nucleic acid molecule encoding the guide nucleic acid,
wherein the gRNA:
(i) comprises a direct repeat sequence having at least 65%, optionally at least 90% homology to any one of SEQ ID NOs: 374-466, optionally wherein the direct repeat sequence has (a) at least 65%, at least 85%, at least 90%, or at least 95% homology to a direct repeat sequence selected from the group consisting of: SEQ ID NO: 395, SEQ ID NO: 435, SEQ ID NO: 453; SEQ ID NO: 464 or (b) a sequence selected from the group consisting of: SEQ ID NO: 395; SEQ ID NO: 435: SEQ ID NO: 453; or SEQ ID NO: 464;
(ii) comprises a nucleic acid sequence having at least 85%, at least 90%, or at least 95% homology to any one of SEQ ID NO: 115, SEQ ID NO: 202, SEQ ID NO:220, or SEQ ID NO: 138 or (ii) a nucleic acid sequence selected from the group consisting of the sequence set forth as SEQ ID NO: 115, SEQ ID NO: 202, SEQ ID NO: 220, or SEQ ID NO: 138, and
(b) allowing the target nucleic acid to activate the nucleic acid-guided CRISPR nuclease system to cleave a detectable substrate.

68. The method of claim 67, wherein the direct repeat sequence of the gRNA comprises a direct repeat sequence having at least 65%, at least 85%, at least 90%, or at least 95% homology to SEQ ID NO: 395; SEQ ID NO:435; SEQ ID NO:453; or SEQ ID NO:464.

69. The method of claim 67, wherein the nucleic acid-guided nuclease system is an enzyme system of claim 46.

70. The method of claim 67, further comprising detecting the presence of the target nucleic acid by detecting the cleavable substrate cleaved by the nucleic-acid guided CRISPR nuclease system.

71. The method of claim 67, wherein the nuclease is JW13166 (SEQ ID NO:62), and optionally
wherein the guide nucleic acid is or comprises a nucleic acid sequence having at least 85%, at least 90%, or at least 95% homology to SEQ ID NO: 202 and/or SEQ ID NO: 248.

The application's sequence listing, which the Patent Office published only in electronic form, follows.

SEQUENCE LISTING (467 sequences)

SEQ ID NO: 1 - protein, 1249 aa, synthetic construct
MNQYIHADKKENKKRPNKSSIIRIMVSDFDDEYIQEIKVLYTKQGGVDTFKINKMSYDSASQKIIFEEVATQNMLSVEDSNLNFKRPMVECKNGDIYVVKPSGKVNAKGQAIEPLRSYKIHGKYLDLTEAIGKDNAELSGKKQIYLHVEDLLGMHTTADSIDRRRLESETQRTLLSKEVMENYALIMGHEIKLNESDETYKLACSKEIYKANRFLDYRSRLLYYYSFINHFLAGLSKGATYEYAGKSLVTEIPDGEVWQLCELEVTAYHGIYINKKTNELVNENCLEIDAIYAQMAKNMRKTLNEFVENYNAMIEKQNELNKNKPQMKKAIVQEPIKFENFTEEKINQDLHNIVYILSDLRHKLMHFEYRYFDLLMTGKKMGEKSEVEVSVPDRNSELPASKNQPSKDKFRKGKKLSELLNLNILKELDTFVKVKESYQTTYLETNDKIEILGKLKTAKSIYQIYHQICQRKNGFNKFINSFFIVDGEENTEVKDCINEVFRKEIHYFETEIAKSNKDTLDDKYKNKNQSQKTRDRMEDQIEECKRYQDDESNIDTWVAYHKDIHYSKRYKKLYSKHKTLVGNLNSAVSKGLDGQVIKKINDDIAIIKREMNEITKANSKSRLRYKMQMAYGFLFVEYGLKIPKFLNDFDLSHERTASKIKGYTSPEKVTQYLTNGEGNKDNFNLDELTKNFKKQMKFEFLKLNEDNNLIKLYILIYQLLPRELKGDFLGFVKSNYYDLKHVDFQTRETEAKDQFFHNMRLFEKNVKAFDLIQYSIGDEMSQLGNETFNFSQALSKIVSDDTILNSATEIPNINCLVYGSLLKYYENAFRLSSEIEIRALIKIARKEKEVVDHSNSYSINKAHSKIEKELKERDRDKEVSFFCILEYAHKNSLNQKGDYTDSEIYDKASNLRNKIAHCDYRNLFITNIICEAENINVKVKYLIDVSNTIGLNTVDLGNDMVNDYLMSYDKQMTYLVKTSEELLKESRLDKSKEKKERRDNLKNETRSHSEIYMEYEWISDYLVKLKDNHEILLKKNKTEDLKLNRAYELIKNYNVALNNKSKIKISELTADHINNNWVNIWGVLNHELQEINGLYLYKVTPKIKKGIYLVLTDKKNYCLNINFYTLKKVPSKDDSEMTEERYLRDISEKYYFTVGEDSMKALKDRLQTINDKCIVNYVNKIDCKNENLKGKSEFKVIDVYNSWDKKYLSISNEESQHWSVETKRDKKYKENLILNLMEKSSFKLNLHQL

SEQ ID NO: 2 - protein, 1046 aa, synthetic construct
MAHNPTYLYAAYLNMARHNAYLTLSYISVAIGGKEGAEDKLLNMEALNILKKPKAEPEKLKKTEELLTKHFRFLLPMTDNDKSAGYHEILTTAFKLLNSLRNEYTHYQHEASDFDEQFMKNMKNCFDGAKRTVKERFNLEDNDLKHLDRFRQKANDGKKGKREYEENPTFHYKFDDENGRLTEKGLAFFICLFLEKKYATLFLTQLSGFKKGDTKGTKATKEVYSIYRIQLPKLRIDSKKPEMALGIDMLNELKKCPAELYDVLSTEDQKRFRIIPDEEPDTMDDTEDGEILLKRHKNRFPYMALRYIDQNELFPNIRFQVALGTYRHHFYNKLGVDNIQRVRILQKQLKGFGRLDEIEEKRKTVWADKIRPFEKIEKDSAEQEPYITDSYAKYIISNNKIGLKWFDRQNDYYLPELNEKGAKNEAPTCWLSIYELPALLFHSILCNHSSDTQNIIRDYVSKGYRKLFKEVASGALQPASKEKIVNQLKTAYNLDFTRIPKELQDYLTGKPVKMDDQLNKLCSERIAQMVSDSQKRLERIDNDLKTIKDRKSNKVGKKRFVEIKSGVLADFLAEDMLAFQSSSDNGKDKLTGMNYQILQAALAYFGQYKDQMTEIFEKCKLINSPIEHPFLKNVMAKNATNIVDFYIVYLKAKEIYLDKCLREKQYKNDYFLHVDRQKWTERNTDFYKVLAKSYAEKLPVELPRGLFNDAIKKLLTKKHGDNPVIREALSKERCNTTFLIQTYFKAICEDTTQEYYTFNRSYKIFNLLNDNYVGNKLQPAYYAVNEFEKRVKNIDAEIEKFDSQQHDKLHRLLHHFKENEKILRLYKVQDILLFLMAKRILITEMGENNIGKYQLKQIMPDSPTDILSAQTSFSITLTKNGCQKIIKQEKLKLKNFGDFQRFVRDRRIETLFPYMKADSIDRQILEAELDAYDDKRVHIFELIHQFEESVLTKNPSILSGKTYINFAGILKASPEIQTEKRQQMQIIRNAFCHNTYPQKIEKNIEDIEKPEGKTDVPFSLCEKKEIPEIAEFLTESLEDLIIINEH

SEQ ID NO: 3 - protein, 1009 aa, synthetic construct
MDTPNFSERIPVSLQSHPYYFAHYLNMARHNAYVILEYVNRELIKPGKNLDEDNLIQSTVLKDGYFDRKPDELSHRNRLLVQHFPFLREAENEGARTCNPVSYKLKTALAALNQWRNNASHYPLNQNHEKDFDLQPFFSFAIEACKKRMREVFQPDDFYLLETNEKQFYTLHNENGFTEKGLYCFICFFLEKKYAFQFLAGIKGFKNTTDNKFRATLETFTEHCCRLPKPKLDSSDIKLDMLGELSRCPAPLFDLLDIEERKKFIREPEEVKPDESGDREEVQQVLMKRYDDRFPYFALRYFEEKNLLKGISFHIHIGRWIKSEHTKKIMGAERDRRLLKDIRTFGELKEFSPEHAPDYWLRDGITPDDVDQFSXPQYRIVGNRIGIKLNYNGHNRWSVPDKEINVKPDAIISTYEFLNLFLYEHLYQKKLTGLSPAEFIQDYLDRFNNFLSEFKAGHIRPVGDFSLEKRRGQGDEPDLTARRKSLQKELDRFVLKGKDLPDKIREYLLGYKQKSEKKQAKWILGGMIKETVYWRNKAEQSPEKMRSGDMAQQLARDIIFLTPPHTVKEHKQKLNSLEYDVLQYALAYFSSNREKLYSFFKEHQLTVKGDRAHPFLYKIRLDECQGILDFFIVYMQQKEKWLGWLDRNLKSPRLNEEEFFNTYSYFIKTDTKRAIEMDYESCPNYLPRGIFNEPIAKAVQKAGVKIKDEDNASYALSVYSNGKTQPFYNKERYYNKGIFRMEELPEKLQPKELLGKIQWTIKSSGKDTEEFRSLQNLKNRILNTEKEIRYVQSTDRALWIMVADLFPETFELRPDDLECIGHDLSDDLLSRPYQMKEKVYNYTITDYLPIKRYGEFRRFLKDRRLENLLTYFEEGVPLHREALVAELEAYDLQRKNLLEIIYRFEKLVFDRHRHELTFSGEGENQYVNHWDYLDFVARKYGLSAEVKELNSERFTELRNKMLHNQIPYQLWIKEAIAAREENTVCGRIMGMIGEIYERMTTEIEKQMQV

SEQ ID NO: 4 - protein, 1161 aa, synthetic construct
MENQTQKGKGIYYYYTKNEDKHYFGSFLNLANNNIEQIIEEFRIRLSLKDEKNIKEIINNYFTDKKSYTDWERGINILKEYLPVIDYLDLAITDKEFEKIDLKQKETAKRKYFRTNFSLLIDTIIDLRNFYTHYFHKPISINPDVAKFLDKNLLNVCLDIKKQKMKTDKTKQALKDGLDKELKKLIELKKAELKEKKIKTWNITENVEGAVYNDAFNHMVYKNNAGVTILKDYHKSILPDDKIDSELKLNFSISGLVFLLSMFLSKKEIEQFKSNLEGFKGKVIGENGEYEISKFNNSLKYMATHWIFSYLTFKGLKQRVKNTFDKETLLMQMIDELNKVPHEVYQTLSKEQQNEFLEDINEYVQDNEENKKSMENSIVVHPVIRKRYDDKFNYFAIRFLDEFANFPTLKFFVTAGNFVHDKREKQIQGSMLTSDRMIKEKINVFGKLTEIAKYKSDYFSNENTLETSEWELFPNPSYLLIQNNIPVHIDLIHNTEEAKQCQIAIDRIKCTTNPAKKRNTRKSKEEIIKIIYQKNKNIKYGDPTALLSSNELPALIYELLVNKKSGKELENIIVEKIVNQYKTIAGFEKGQNLSNSLITKKLKKSEPNEDKINAEKIILAINRELEITENKLNIIKNNRAEFRTGAKRKHIFYSKELGQEATWIAYDLKRFMPEASRKEWKGFHHSELQKFLAFYDRNKNDAKALLNMFWNFDNDQLIGNDLNSAFREFHFDKFYEKYLIKRDEILEGFKSFISNFKDEPKLLKKGIKDIYRVFDKRYYIIKSTNAQKEQLLSKPICLPRGIFDNKPTYIEGVKVESNSALFADWYQYTYSDKHEFQSFYDMPRDYKEQFEKFELNNIKSIQNKKNLNKSDKFIYFRYKQDLKIKQIKSQDLFIKLMVDELFNVVFKNNIELNLKKLYQTSDERFKNQLIADVQKNREKGDTSDNKMNENFIWNMTIPLSLCNGQIEEPKVKLKDIGKFRKLETDDKVIQLLEYDKSKVWKKLEIEDELENMPNSYERIRREKLLKGIQEFEHFLLEKEKFDGINHPKHFEQDLNPNFKTYVINGVLRKNSKLNYTEIDKLLDLEHISIKDIETSAKEIHLAYFLIHVRNKFGHNQLPKLEAFELMKKYYKKNNEETYAEYFHKVSSQIVNEFKNSLEKHS

SEQ ID NO: 5 - protein, 804 aa, synthetic construct
MKIKNENTDKKTELYSIDKYKGRDKWCFAIVLNKAQTNLTENPDLFEQTITKYDRIRKEGWFDEETKKLIYIQENEHKIKGEIKTLAREVLKNLRNYFSHHFYKQDCLIFPKDNIVRIIMGRAYERSEYEIKKNLKEDISIELPALFEPEGKITTAGIVFFTSFFVERRFLHRLMGSVQGFTKTEGEYKITRDVFAKYCLRDSYSVKAQDNDAVMFRDIIGYLSRVPTESFQHIKNPKKQNESQLSERKTDKFISFALKYLKDYGFEDLKGHYTAFFARSEIKKEKEDIEIKDDKKHKPHRMKSKIEIHFDKTKEDRFYIERNNVILKIQRKGGRANILRMGIYELKYLVLLCLSGKAREAINRIDDYLNDLRNKIPHIENMNKEGIGEQIRSLPGFVRSQLGFVQIDDEKKKENRLDYVEKKWEKKRAESKELKLNRKGRDILRYINERCKKPLTIDRYNRILELLVEKNIEGFYHELEELRKTGRIEKNITQALVGEKNINALHIKICKLVQDELKSLEKEDLKKYIGLTPKEEKVVSFEEKLGRILDKPVIYKGFLRYQFFKNDKKSFARLVEEIIKEKTGGLDVPIETEYYSISTLGRFDKANKTLYETLAMDRLCMMMARRYFLSLNKILAKRAQNIEWKKESGKEFIVFKFNMPQDTGKSISIRFSPKDYTKLYVKNDSEFLARLCQYFFPNEKAIDYHKLYSHGINKYTNFQKEGIEAILELEEKIIKKRKINSPENYLSFEEILNQSIYNDEEKNTLIQIRHSLLHYQILFSKNDLTKFYNVMKREGIEKIWSLVI

SEQ ID NO: 6 - protein, 809 aa, synthetic construct
MIKKPANRFALPKVIISEVDSENILEFKVKYEKLARLDRFEVEAMHYDEKNEIIFDEVKVNDGLIEIVYKENNKKLVVEIEGKAYEISGQKIGGKQRLLENRVSKTKVQLELMNHIEDGEGNKRVSRTERELIVLGDIKLYSQIVGREVKTTKEIYLIKRFLEYRSDLLFYYGFVDNFFKVVGNEKELWKIDFNTSHSEQLIEYIKYTFNDNLKNDRQYLNEYVTNDVQIQKDFNKVKNVFSELRHALLHFNYDFFQKLFNGQDVGFDLDIEFLNLFIDNIDKLNIETKKEFIGDEKIRLFGENLSLAKVYELYSHICVNRVGFNKFINSMLIKDGIENEALKDKFSTKFTGNAYYIDIHNSREYKDLYKKHKRLVINVSTLKDGRAIRQENKKIAELKKQMTTMTTTNSLARLECKLRLAFGFLYNEYNDYKAFKNSFDSNLKNNQFDVSNVDTSKAYFLSTYENRKPRTRERIDKVLKEIESLELKGLIANDPLLKFILLMFVFMPQALKGEFLGFVKKYYHDVHSIEKDTKDKEEDLIEFMPLSLKLKILGRNIRTLTLFKYALGSPINYNSTDEVFYVEGNRYGKVYKQLGISHNQEEFDKTLTVSLLRYYSALFKLVNDFEIYSLAKGNPTVVNLDVLVDDSSSPYKFRGFYNFGNMIGQIHGLTHNQIKNEEIMIRNKIAHFDIEMLLKKPLLAQIKLDVQRKNLIKFIEDRGDMKSVLGYDAINDFSMKMVHLRTKIKVNSDKLQIMMGLLTNVKTPNDFYNIYKVKGIESINQHLLDVIGVTESEKKIEKEINEGNKRAVK

SEQ ID NO: 7 - protein, 1127 aa, synthetic construct
MENLSKEQIVETQEQNKRTWGNDPQYFGAYLNMARLNIYNVSNHLAEKFGITAIENEEQISNSFLGDKENKVFKNKQNHIFSNLIRYLPIVKVFDFEKLPEEEKISLKDNFGKDFKELSDTLKIIFSEINEFRNDYSHYFSTEKKNKRKTKVSDKLKDFLNINYTRAIQYTKNRFINVFSDNDFCLAEEAKLVENDNTITQDGIVFFTSMFLDRENAFQFISKIKGLKGTQTKAFKAKREVLMAFCINLPHDKFVSENTEQAFSLELINELNKCPKTLYNVISENEKQHFLPKLEDEQIDNVLENSVPYTIDDYENYIENITKKVRNKNRFSYFALKFIDQKELFKNWKFQIDLGKVVLDEYTKTLQGKDETRTVVENAKAFGKLQHLNDEENVLNKINKSESKTHFEQFAPHYNFDNNKIGISRKEDSAIFISRNTDKKVKFNLKQPLPEAFLSIHELPKIILLEYLENGKTEQLINDFIEINNSKILNKKFIESIKSKLTDFNTFNKRSQGRKEKSAYKKEALKYLLDRKEKLNQILAEYNLNVKQIPTRILDYWLNVADVQEKTAISDRIKLMKRDCMDRIKAMKKGKAPKIGEMATFIAKDIVDMIIGEEKKKKITSFYYDKMQECLALFADKEKKELFIHICNNELKLNESDGHPFLKNIILYDYRYTSDLYRRYLEEKADNRNNLNKNDTSWLAKNFYFIEKVEVFDKRLNRMEFKPQTVVKIKDKSKIPFTLRQLEKEKSSFDTWFENITKGKETTDKKKPVDLPTNLFDNYLKELLIKDLSKNNIKFNPKTNYNELFKLWWKECRKDKTQSFYNAEREYSFEDKKLNFKINTKSKFEDYINPEFAEKVFKLKSSRREKENSTGRKLPPLMIKDLEKSMANKIGSIEKDIRILQEDDCMMLLMFEKLVDNNLELKLENVDTLMNESIEIKQSILGKLSFDDFGDNVNKNDRIIISKNITETRKRKEYSVLKKYIFDRRLPELFEYFETEDITMEKIKLELGTYNKAKDIVFDLIFDLESAIIKKNENRIKELNKDKNGNIQTGNIQHKPYLFWLLEKNLITEQEFTFLNMVRNTFSHNQFPQKKTMELFIKNWNKNEYAKQILTVYTEKINNLIEKVIDI

SEQ ID NO: 8 - protein, 1040 aa, synthetic construct
MESFPDYKPLFAAYLNMARNNCFIALSHIAEKANKGGGMNEDAMQECSVITLLANNKKPDESLKVEEMIKYHFPFTKSTKRIDPVPSDYAGLIISFIKQLNELRNFHTHYLHRPYATDANVIAQLQFLFDTSRREVRKRFALKEEDVKHLVRKTITIINGEKVVVEKDNYPYAFVNKEGQFTTKGIAFFITLFLEKKHAYLFLKQLRGFKNSSSKQNKATLETYCFYHIRVPQPRLQSQDTKVGYLLDVLEELKRCPKELYSHLSEHDRMRFTFVNDIDATDEQPESILKRNKDRFAHLALRYFEHTGSLKELQFYYDLGKYYFKVYEKSVDSEIRLRRLHKYMKGFGRLNDFGLENMPPLWQQLVKYTDQLSEGYAEPYIVYTIPHYHIVNNQIGIWINNGFIPPLLSPVSSPEPQMWLSIYELPAIMFYHLLTKKRKEYKSVLQILSNHRKAIHLLFKDIKDSKLLPDAVETFEAELRQRGLHRNHIPKPLLEYLLNESPGTPVAAKAENRLIKLQNETSFLFDKIDIDLEKSKEKAGGKYYKPIQTGKIAQFLAKDMLFFQPPINKLKGKATGTLFQVLQARLAFYGRDKHLLEDIYRECNLIQSNNPHPFLQGLPITDSLIDYYRNYLVRRNTYLEKCLKKCMQGKTGSQELHFLHLGEREKRAGNDYYKGLAGKFIKMPLNLPRGLFMEELLKVFSAENKTMQDIADNSRTNTAFLIKEYLKNVLDDDTQDFYNWKRTYAVFNKYYDNRKPQSRDSLIERYFDTSVLSTEAEKIKLEIVKKQRVDIEASENIKRNYRYYSENEKQIRHTKSCDIVLFLIIQDLFPSLEQSVFKGLAINQLKLSDILPDAEKGILSLPIEIRLPLYNKFIIQRGIKLKNYGDFRRFLKDRRLQSLLPYFEEESIDRVIIEKELQDYEIARIEIHRLVLEFEKKVITENKITYENSEINYVDHEKVLTAFFQNEPSSNKKELIRDIRNKFSHNEYPDANKFKGLIESDSLNTTVAKKFIQIAKQYYQFEIAPAPPLLVLSPTSTTIL

SEQ ID NO: 9 - protein, 1062 aa, synthetic construct
MSIMNIITVLNHIHQIAGLKRNELGDDDNIYSHPVLKYIAPENNSTTLPEKRDLIKELLLEYLPFLEAMKDCYKEVKVEKDKRNNKYVKDKKQVFIRNYSDIYCIYWTLYNIFSTLINYRDKSCHYRFIPSKDQEEYSKRTEYDTVRIINKYYTYALRKTKEKYGYTTEQLSFIQNNRYTDDKKVNFNFFLSMQSSNNNLSHVGVAQLICLFLQKKDVDNFLENLPIYDNRYCLGIDEHMIIKRSLALHSIKLPKERLNSEKKDMAIAMDMLNELKRCPKELFNTLPFDKQERFRIISSDHKEVLLMRSTDRFVPLILQYIDCNKKFKDIRFHVNMGKLRYLFSPNKLCIDNQERVRMLEHLLNGYGRIDEVEYLRKAPNGTFGNTNIPIKGFGEIERDSADSNNYPYIVDTHTHYILNNNKVEFCFCEDSKNKNVFPTIEKEINGKWYVEKTAPHCRISFFEIPAMAFHMFLCGSEKTEKLIKDVYNNYISLFNALKNGALTEENYKDFNIPECDMPKKILDFLKGKAEGKSIDGYVKNILKKELKDTRKRIEQAPSEKDQMPSKRNKIGTKSYKRVLTGKLADFLAKDIVKYQPTLCAGDDYGIDRMTGMNYRIMQATIATYNDDDDFDTFYNVFKMAGLVDGDERKNHPFLKKVLLSKPQNTVAFNIKYLKEKEIYLRNIEKKNIIPPFVNRERNKWCERDCEYYRILGENLLDLPIELPRQMFYKDIRAQLEPLMPEIDFSQTNTTYLIAEYLKRVRGDDFQEFYSWERNYRYIDFLKCIRDDNGRICAQYTTTEERESLWEDSKNRTAEYKRSEEQKNEKKDKNFEDSLEERISSSHIKFQNTEKHIRRYKVQDALLFMIAEKQFGKYLDDIKAKNFKLKDIMPDTDKGILSETMPIDFTFTKKNIKYNIHAKNLKFKEYGDLFILANDKRLESLWKILATDTVNKEEISEEFAKYDFCRPDITKLVLDFEKDVLEKYPEIIEEAEKEYKKFDFKFILDWLINKKKLNYGIRNKLLLIRNAFNHNSYPDKKYAEVRELPEIATNLKKTFDENAKKYE

SEQ ID NO: 10 - protein, 1188 aa, synthetic construct
MRIVKPYGRSHVEPAATGSTRRVLRLRPPNDKDAKDIEAFARSHEELVIAQWISALDKIATKPSGKDGASDAQRAFRERLGNAAWTLLETKGLLPGLVTRREHLTMLWRAKVHPYGSTPYRPKRGKPAPSLKGRRYERFAGQLEVDKVDAAAIAASIHAHLHGTAVPAVRPGLIATRARSIAENVLRPPQRLPNEERSWSDDDERAYAAAGDVAREIQELAIAIEEDASQRRRGKPLTRSPFALRDAAPALRGQYGRLLVDASGDALPIAQARAAFPGLFGLHMAVRDCYSRILKDHRKSSVVRILPRDMEELLRLVGAKLTNRDLNAMVRLGKVIHYQSSLGVEDSPENVAANWPADVSGSEFWTSAGQAQIKRNEAFVRVWRHVLALAQRTLTDWIDPQGKTQGDILLANPPFNRDAYNRKSDLLFGKRASLFKGVETFENVVLTLARRETAALRHGSFHFKGLGGFTKVLAEVPKTDASVLAAVRTLWEDDLSERAQRLRQTLRGAHVEYFLDEAQGRRLLSAVLADSGPATLPLPRFRRILQRAHNAWAKETDGPGLPEPANRMDIKTYPALHCRYVALKHVYERPFRHWLEQRDAASLNRHIDRAVDRGTKAARDLNAGDDEDRRRIIVARAASLGRLAEDDNVQDFFFELSAETAGEMRVQRGYASDAEAAREQAGYIEDLKCDVLALTFADYLKAAGLDFIRILAPETPRPDNAAYNLDAIEAPEIDTPGEDWQRVLYFILHLVPVEDVGRLLHQTRKWEILAGDETLSPSVRDRLRGIQLALELYLDMHDAKFEGGAALVGTGAFKDLFETARIFDDIFPSQPGSAQTADDERRVPKRGLCEIMRFGHRPALQPIFSRYRVTEREVEEVRAMEWPVDGTSEIARLQDRRERLHKGWTENKSGLSGDDLRAYVAALREVAAHRHLAAHVTLTNHVRLHRLLMAVLGRLVDYSGLWERDLYFVTLALIHRAGRRPADVLPADGLRFLANGQIVEAVRRLEPDLQSRLLDCLGDIDKNGKVRIRNRFAHFNMLQPGNLPVDLTRCVNDARELMAYDRKLRNAVTQSVKELLAREGLMLGWAMGADHRLSAATLATRQAQHLGKTRRGEKGWHERKLRPIPILEDLHGRRFVDMAAALFGGTRLEPERSLLDHPLDRIEWNPTPKNRYGSRPTSGQGRRNVVPR

SEQ ID NO: 11 - protein, 1112 aa, synthetic construct
MENQELKTRTMKSEPYYYGAFLNMARLNIFNISNHLSNKLNILPTLSSEEHIANAFFTDKNTKIKWEHTYDILRRFIPIVKVFDTESLPKGEVGNNTGKDFSKMSDTLKIIFKELNEFRNDYSHYYSTEKEDKRKITISDELANFLNENFKRAIAYTKKRFKGVFTEKDFELANNIQLFNKDKEITEKGLAFLTSIFLEREYAFQFISKIEGLKGTQKSEYRATREVFMAYCVNLPHDKFISEDAKQSFSLDIISELNRCPQTLFNVITEKEQEKFRPTINQQEKNNIINNSVPYDIEDYEEYVNSITKKIRYDNRFPFFALKFIDETQVFEKIRFQIDLGEILLDEYTKQLANNEEKRQVVQNAKAFGRLNDFIDENNVLENINKQNGSASFIQYAPNYNFDNNKIGIDTTGKRIMPILTKQTDNNKKVKNKLKQPLPKAFLSIHELPKIILLEYLEKGKAEKLINDFLLINESQLLNYKYIEEIKNKLNNFDVFQKRSQRKKLQTAYNKTNIEELQSRKEELNKILKEYKLNDKQIPTRILEYWLNIEDVTPNEAISDRIKLMKRDCVDRLRDIKKGKAPKIGEMATFIAKDIVDMIISKDIKQKISSFYYDKIQECLALYNVSEKRDLFLTICNELRLLDADKGHPFLKNINLNRINYTSDFYVKYLQEKGHKLIKETNYRTGKLVEKDKSWMFLNFYYLKKNETLNKMMTIVQLPDDKSKLPFTIAQLDKPKNTFEEWINNITKGKTKTDKEKPIDLPTNIFDKEIEEILKNKLSEEKIAFTENANYNQLFKLWWTDCRKDNVQKFYDAEREYVIYDEHVKFIPNTKPKFENYYNESFPIVLTRLKRDREEARKLNRKLPPIEKSQVEKVFKQAIGSTEKEIRLLQEEDRIMLLMFEQLLETDNNLNLKLNNAESLLNEQITIKEKISLKLSFNEQEDKKEIIKTIIDKRKRKDFSILRKFKYDKRLPELCEYFETDDISHSDLKKELDEYNKAKEQILANAFMLEKTIIEKDKDGIKALFLNDNGEKKYGNVQHKPYLTWLKNKGLINDNEYLFINMVRNTFSHNQFPQKRTIQIFIDKNRGNPITFAETIKNAYNKKIEEIIVKIK

SEQ ID NO: 12 - protein, 1138 aa, synthetic construct
METQENELFENRRRTLADDPQYFGAYLNLARLNIFSINNYLAKEFQQTELRDDELIQNGFICIPSQKNRNDNKLFERLIRLMPVIKQFDAARLPNEEQKSGQAEGKDIKTMAKTLKALFKDMQEFRNDYTHFYATDKQECRKLTVSSETATFLKASFARAIEYSKVRFKDVLAEDDYSLVAGKELVEDENTITTEGLVFFTALFLDRENAFQFIGKVQGLKGTQFKSFIATREVLMAYCVRLPHDKLISDNPIQALLFDILNELNKCPKKLYNVLSEEVKKEFRPELSESGIENMLANSFNDEEREKLLDEIEYKEYIEQLTIRVRHSNRFHYFAMRFIDEQELWPGIRFQIDLGKYTLTQYDKQVLGESIPRSVVENTRAFGRLSNFLTADPDSLEQRIDVDHRANGFEQFAPHYNADINKIGIAFTEKEQLPYVVPTKNAETNRVKYSFKQPQPDAFISLHELAKAILLEQLQPGESEKLIRAFCSTAENKLFNLEFIESIKWKLPDWKPFQKQCDTKKSRAYITKKKMFAYAPRDRKKLLDELLAPYGLNWKQVPERILNYWLNIEEVHDARSIKERILLMKRDGLKRLKQLEKHRKDPSIRIPKVGEMATFLARDIVDMMIDKTKKQKITSIYYDKMQECLAFYADAEKKRQFIGLVRELNLNAPDGHPFLKNLNLESIRKTSEFYKLYLMEKVEKMIENGYKSNGDKRFKNIAWIIRVFEEKQKNEKNGKDDTIYRIPNNRNDIPYTIRQWEKETSTLEEWLHTINHGKQEGDRKRPIDLPTDLFDARLCELMKGQMQENGQTFADTAKYNELLKQWWSLREDETQPFYNGARHYVIKEEAVCFMPGAQPRLTSCYADAVEEAYNRLSAERNIARRHNKQLPLIQKQKVEKVFKHTLYDTEREIRLLGEQDRILLLMAEQLTPGRETLKLKTVSEELTRPREIKKEFPYISNYNAQGEKLPKDEPKPKIKVTVTGIMQLKNSNDLNRFAHDRRMPELVAYLPNATIDADTLRYELMDYNKARLTVFDAVFRLEKAIIDQDREGVITLFTDEQGEAKQGRMQHKPYLQWLLNKGIITQPESSYLNMLRNSFSHNQVPHIAVALNGTEVVPVKNIASTIAGAYKQKIETIIGKIG

SEQ ID NO: 13 - protein, 1148 aa, synthetic construct
MNNNILEQSTSGSEKRASTRTLEADPQYFGVYINMARHNVFQIINALTHKFSKQIENAKPINDDENIANDYLINIGKGTDKSPTIIEVLNPAHPLHRLYGEHVFRALKRYLPLVTIFEVPSINTEDIIKDTDDILPVLFQDLYEFITLLFYELVKFRDAYTHALALDEQGNIVPRKIDLHPNLRHYFEHLFYKAPDYTLRRFRSTQEKIAHGFHEKDFALLKAHNLYQDPHSNELTTQGLFFFTTLFLEQKYAYQFLKRFNGFKNETIQPFKATLRVFTAFTVKLPNDKLASDHPGQSFLLDMLNELNKIPQSLFKHLTPKDQEMFERINDEALTNILKNTDEASFKDVDDLLGKMAPLIRREDRFPYFALWFLEQTKAFNHIRFQISIGKIAYSPYDKTIIGETSPRIIKFDIHGFGSLAEFSDEDTLLTTLKRQLPAGSPHASLTFSQYAPHYHIKNNKIGILVDYPSGDRPLSNITQQPDGKIKVNHIKPTAFISINELPKLVVLALLGTNKDNKPIGNDIERLIRSFITKFKNQLFHLAPLTKIKNGLTFSPETFTRRMDKDKMVKGRIPKSELAKREEYKIYLEKRKAVLQGTTDLKLNVNQLPTKIQNYLLNIDEVSDEKSIHLRIKTMIKEVEYRLKKIDRNKLPKVGDIATYIARDMLDMVADVRTKSRITSAYYSQIQRALAYFALDKTRLIDLCDELGLFNHQTGHVFLIREIFLNNHHILGVYREYLTKKQNWIDQNLIVKIQERGKRLTKYILPTNRPLPYKMKQSINKGFEFNAWLQHKSTMPIDLPTTLFDESLTSLLKKTIAQKLGIASKSEDKFGRLLDRLLKQDTQPFYKFERIYRKPFSQEEPEPFNILKLTHTALKQRFGKPAEVNEKIIRHHQRKDQIVRLMCEHLFKNNSELAFEGEFLLENLHPASRNNPLDAPMVFEQTIPHTHKKIVAQDSNKWIQEVKKTNNRNKAWYRWTLKDFGTFRKIIHDRRLPALVNSITGDEIDFDLVQFELAAYDRARETIFDQLFLLEQFIADKDMSYIKQHKAIERMQDGKGFDEVQFNTYADWLSDKGLLTPDEINGLKEIRNRFSHNQWPGISKLGIQPISQEQQSAFVTHLNIKGWVNEHHTPLAMFMEKLVINWVSKAIT

SEQ ID NO: 14 - protein, 1141 aa, synthetic construct
MGVEKNKVFESVIMNFDQERKYGFIEYKETNNLFFHMENVKNPKEIVKGAKVRFEIYENPKPKKQNQRFSAINVEVITDETHKEAKIQKNEFKTFDQFTKELQETQKVNGETKKEHITKNKHTNVKAAGVKSVFAVDDGNVLITSFGRGNAADIETLKSDDDKTINLTETENQKKYVVTNKRSNVKGLADNPTKVESIIPGETQIGFKSILEKHFFGRTFNDNIHIQIIHNILDIKKILAVHTNNIVYALDNIHERGRENSAEKPIDMIGAGGISTSKEYEQYCSEKSDYEDNFLKQLINNERIAYFGNAFFKDEGNKKVMRTEKEIYYILGMLNEVRNVSTHFTEEDNRDWAKANLYNLSNRLKVGSKEVLNQLYKEKIDKIDANGFVNKGCKRDFSILFKSLNLTTDKDKGELVVGFYDFSIRKNYKNIGFSIKTLREYMLKISNSTLCADTISNNAIRPKAYKLYDFIIWHYYMNKPDKINDFVEKLRTQNKNDEKIKLYYDEAVCLLSELGREIHTMTSCVHNIENTSYEITDKKQKEYYKMQINSLNSADKVSDFSKVIYLVTLFLDGKEINDLLTTLINKFDNIASLLSVLEKQSGKKVEFVENYSFFNSSNLLKEKTLNKSENYTCKIVEELREINSFARMTGDCKIRKSAFEDASQLLGYHDKTVNNLFEVLRLKELESKDWKKRTDDEQQEYDRLLNKHHYFKSGKKLPDTGLRNFIINNVIESRRFNYIVRYADPKKIRKCTENNELLKFAFKDVPDSQVDRYYNICVTNKITNATREEKIERLVDIIKSMNLSKVATVKQRDKQDNVEKQKQLAIMSLYLNILYQIAKNLVYVNSRYVMAFHSLERDSQMLFDAYYDVKRGYCDLSTVLLFGVDDLQNRNRGSYKYLRDNRRSNKDVIETFGDFKGKVSKVVEKKNQGLTNEIYDSLCNVAGTTKTEVQNEIKSILKSNGLDESASSYLSHKLVNKVHSYKYLKQNLDCADNTMINQFRNNVAHLNTIRNMDGIENVTGITSYFQIYHYLMQKALYKEFKKCRENAVRKWIPYITENAEPKYVYWNKKEQQEVEVSFNPKIFGYMENIKNHSNTYCKDFVKALCAPFAYNLPRFKNLSIEELFDMHELSEEPKESMKLTD

SEQ ID NO: 15 - protein, 1092 aa, synthetic construct
MEKSKLDNEMTFAEDAYYFAHYANMARHNAYLILNHINKSIFGNESTLKEENLQIAIIKILDPKNGADHHAKAIKLLNHHFPFIACYYKEDIKKAVENSAYKEMNDKKLDHLKEPLTLKQILKTLTGIRNELNHYGYSRKEHPIPFFQDLFNDSIQLAKKRMIEFNETRFNSIQDSPYHKMVDPKDSVLTDTGKLFFLCLFLDKKNAFEMLAKVKGFKNRTDEKYRATLECYTQLCCKTPYPKLESSDISLDILNELNRCPNALYQVLSEEDKLKFKKEPNEETAEELNPIMKRYDDRSAYLALRYFDRTKCLDNITFHLQLGRKVMGEPHKKVFDGKERTHQILKEMRVHDKLSTYETEEAQTFFQSKIESNEVELFAPHYRMVGNRIGLSFGTPSEKKEGYSIPINNQPAPQAILSTSELGALYIYNRLYKENKITQSPKNLMSTYLQTMNRFIKDWKNDGIKPETSSNKIIKERNQERTKQTINELKRRTDHLQKLLDEKYAGLKVKHLPDICREHLLNYQSDDNIQQAIDFLKKTLSDTNFKKKQLEQFERNMVYRSSNSKQLKIGEIAQELARDIVFFLKPIKKEITNRNKEKVTVFQKINNQDFDILQNRLAYFSLYKEELCSFFDDLLKKKHMKHPFLENVKAETKWSNGLIEFYLKYLEHKLKWLNTYTKNAPNNTTRPNYTTSNRINKNRSTPNKKDEIEEKEIDPEKIKETFIEKYNYFLKVKTSSPKNYQGKAIFIPVGLFNDAITKAMKESGYQVEDDEKTPNAAYWIKSYFHGATQPFYQLPRYYNRAKKDEERDLVEAALLKKEIKNYYVKANKKTQNDFKQLAKRIRKQEEEILTQQTSDRVLFMMATDLLNGGSDGRQTIECEQINTLGFNLGENKILDENRKVSMNIYGRKVVSELPIKRYGEFRRFMKDRRLENLINYFPEGKDIELGVLKSGEVEAVGERFSSSTLANELEFFDSQRWLLMKSIYEFEKKIYTHFFDVLTKNVPEKEMMENNYIAHYHYIECAKKLELSVSELEKDDFKELRNKIQHNEIPYSQWIKNRISTKDGHLITKQIVELVLSIYQQMNNELDQLIRK

SEQ ID NO: 16 - protein, 1152 aa, synthetic construct
MNHTIGKGISYNPFKHQDKHYFGSFFNLADNNIKDVFNEIAQRLNHKDSNPKNIINHYTDKNISLVDFEKFVSLLSNYFPIVNEIDQINCDAKGSNGNYKPKTKEERLGYFKKTSYSLLEAIDKLRNYYTHYHHEPIEIDLNLFPFLDHVLLKTALNTKKNYLKKGKTKELIKDNLKQQFDFIFNIKVEEYLKEKNPTSKKIERAGGKIENFNKSLVEEITSAIYNDAIKDFIYSKGENAELSNRKKTSFSDKDYFYYNDDDHFSLPISSSGIVFLLSCFLNRKEIESLKDNITGYKGKIPNSELTLKHNGIRFMTTHRIYSHWCYKGLKTKIRTSEKATRETLLLQMVDELSKVPDVVYQNISDDLKKTFIKDLNEYYIDNQENQENLYNSKVVHPVIRKRYEDKFNYFAVRFLDEFLDFPTLRFQVHLGNYLEHSTSKNIGNSKTNREIKKKIFVFGKLSEVNKLKNDFFEKNKQNDTSWQFFPNPSYHFPMENSNDLKKANKIGIYINHDKSINKFKHQTQKQTHENKIKLIQKVIGDKSKIKIGQPIAYLSMNDIHSILFEALKNPKIKESGKIDGEHIEYKITHQINKQIKEIQNKNENAKIIKNQQSKQETDFNIDKLIKDVNKEITISEDKIQTLKENKKQYQNYQRSKKSEKHNNSRKRNHILYNSEKGEIATWLANDIKRFFSKDFKDKWKGHHHSNFQRNLAYYNTQKKEVELLLKGLDYRKTIPMLDFSKNSFLDFYRKYLEKRKQYFKNLLSELKNHKSGKHDSIEKLKKKCFTHFKKRNYRNKTIEDKIQNMLANPIFIKRGFMDTKPTMIPGKNFNQNKSDFADWFVAFKEFSEYQKFYDTNLYPIDLSQKSKSATKKINTEIYKQKKNDWAIWQMTKYIFKDIFQQDSQNISLSEIYQSRQEPISNAKNTATDKRKQNSIWDSTIDLQLNRKIKISDVKLKDIGNFRKYENDQRINTFLDYGDFSDWMAYLPNNWQENFEYKPINVIDIQLDDYEKIRQNVLLQEVQNLEREIYNNVSNKNEILVQDSKGNKNPNFKAYILKGLLKQIKNLDITNFKLPQNAKEFDTLTFKHLQTLSVIEQKTTLLILLRNKFAHNQLPNKAAYEFCQTILEREKSQTYAHYYSELFKTLKKELTDI

SEQ ID NO: 17 - protein, 1146 aa, synthetic construct
MMETIKQEIGKEYNPFKTEDKHYFGGFFNLADNNIKEAFNEVSIRLSQKGASPKTLIEKYTKENVSLVDYERFVILLSDYFPIIKEIDQINKDEKDNKGILIPKTKNDRIKDFEVILVSMIDAIENLRNYYTHFYHESIEIDNKMFYFLDKVLFKTVLDTKRNYLKEDKTKEMIKNTLKEDFNKIFNLKVDEYLTKDNLTSKKIKKARKYGNSFDIGLTKEITASIYNDAIKYFTYDKNEKSILSDSRKTAFNERDYFYRDKNFDLPISSSGIIFLLSCFLNRKEIEDLKSNIKGYKGKVTKNEEPTLEKNSIRFMTTHRIYSIWHYKGLKNKIKTSESATKETLLMQMIDEVSKVPNVVYQNLSKDLKDSFIEDWNEYYKHNEENTENTINSKVIHSIVRRRYKDKFNYFAIRFLDEFVNFPSLRFQVYLGNYLVDSRPKESANVITEREIKKKIFVFGKLNEVNQLKNDFFSKIEEDKLETNLEVFPNPSYHFPMENSEELKSANKIGIYLSDIENLLEPFKKHLNKNTSQEKISLIEDITQQNENIKIGQPLAYLSMNDIHSVIFEVLKNPIIKDGKIDGKSVEKKIKNQIYKQINEIKNKKEESKIIKNFRKKTESDLDLKKMIDDLIKEIKITDDKIKKLDENKKEYFDYQKNKTAKKRNYILQNSEKGEIATWLANDIKRFFPKEFKEKWKGYHHRELQLSIAYYDTQKQNVKLLLYGLDYRKEIPMLDFSKPNFLDFYEYYLKKRKPQLYNLLSDLEKLERGESINKEMLLSKYFKLFRKSNYQNKSLDDKINTALANPIFIERGFMDGNPTVIPNTTIKGNESRFANWFVAYKQFDEYQKFYNTEEYFLELKDKTPNEIKKIQSQIYTQKKNDWAIWKMISYIFKDIFNQDLQNVSLSELYQNREQRLENEKKSKEGERKQNFFWNKTVDLQLNNKINIPEVKLKDIGNFRKYEKDERIKVFLSYNDITDWMAYLPNDWQEKHTIKPINVIDIQIDKYEKIRQHHLLKEVQNLESEIYNKAINKEELLQEDIKGNKNPNFKKYIVNGLLKQIKGLNVENFKIPNSDKEFNALSEETLRSYTELEQKVTLLVLIRNKFAHNQLPNKDVYAFTQSIRKRQKNETYAEYYFNLFEKIRGEI

SEQ ID NO: 18 - protein, 1008 aa, synthetic construct
MDTPNFSERIPVSLQSHPYYFAHYLNMARHNAYVILEYVNRELIKPGKNLDEDNLIQSTVLKDGYFDRKPDELSHRNRLLVQHFPFLREAENEGARTCNPVSYKLKTALAALNQWRNNASHYPLNQNHEKDFDLQPFFSFAIEACKKRMREVFQPDDFYLLETNEKQFYTLHNENGFTEKGLYCFICFFLEKKYAFQFLAGIKGFKNTTDNKFRATLETFTEHCCRLPKPKLDSSDIKLDMLGELSRCPAPLFDLLDIEERKKFIREPEEVKPDESGDREEVQQVLMKRYDDRFPYFALRYFEEKNLLKGISFHIHIGRWIKSEHTKKIMGAERDRRLLKDIRTFGELKEFSPEHAPDYWLRDGITPDDVDQFSPQYRIVGNRIGIKLNYNGHNRWSVPDKEINVKPDAIISTYEFLNLFLYEHLYQKKLTGLSPAEFIQDYLDRFNNFLSEFKAGHIRPVGDFSLEKRRGQGDEPDLTARRKSLQKELDRFVLKGKDLPDKIREYLLGYKQKSEKKQAKWILGGMIKETVYWRNKAEQSPEKMRSGDMAQQLARDIIFLTPPHTVKEHKQKLNSLEYDVLQYALAYFSSNREKLYSFFKEHQLTVKGDRAHPFLYKIRLDECQGILDFFIVYMQQKEKWLGWLDRNLKSPRLNEEEFFNTYSYFIKTDTKRAIEMDYESCPNYLPRGIFNEPIAKALQKAGVKIKDEDNASYALSVYSNGKTQPFYNKERYYNKGIFRMEELPEKLQPKELLGKIQWTIKSSGKDTEEFRSLQNLKNRILNTEKEIRYVQSTDRALWIMVADLFPETFELRPDDLECIGHDLSDDLLSRPYQMKEKVYNYTITDYLPIKRYGEFRRFLKDRRLENLLTYFEEGVPLHREALVAELEAYDLQRKNLLEIIYRFEKLVFDRHRHELTFSGEGENQYVNHWDYLDFVARKYGLSAEVKELNSERFTELRNKMLHNQIPYQLWIKEAIAAREENTVCGRIMGMIGEIYERMTTEIEKQMQV

SEQ ID NO: 19 - protein, 1063 aa, synthetic construct
MFDNEQKNLEKEPYWGVFLNQARLNAYIALRDISERLEENAADEDSLSEWPVLKYLDNDTDAVKSRRIFDLVEKHFSMLKIIYGGEKEGDLVKRSKEYKIILKCLFRALNFYRNKFCHMYSGNRARKYNEKELIKYLEDCFDASVRKIKELRRLDEKDVLHLRRKIAEGKDANKRVIDNPQFRYPFKNEKGELNEKGLYFLASIFLDKKEAHEFLKKQEYFKNDSEPKYRATLESFYHYRIKLPRPVIESDVDKNGLALDMLNELKKCPKELFDLLSKEQQEKFRVVDSEDADEEGNEILMRRYSDRFPYLALRYCDENQVFERIRFQIDLGRYYFKFYPKETIDGKTQQRSLDKRLKIFGRIKDVKSKVEQEWSGIIKSPDTIEENPNEPYKLKTTPRYNIVDNQIGFVITGDKNLPDVKRPDGRIELEKPDGWLSIYELPGMLFHGLKYGFDKTERMIKIYIEKQRKICKEICEKGTITPDDGESMPEALKGGAKAAKRNYSEKKLERMLQDTEQRIRAIQTTQKRMDEPGNKPGKKKFFDIRAGKLADFLARDIMALQRFDPAKHGKDKLTAINFQVLQATLAFYGAKKDVIEDMFKGIGLLEGDNPHPFLNQIDPAQYNSIAGFYQAYLQKKRSYLEDYRKEEEYDEQFLRPKRQRYAQEKREIKTVARQLLDNPVNVPKNFFKKEIEEFVFSQDPSLKKSKMNTAYMIQALFEKHYGRQQPFYSYNRTYPVVSKAIEYGKKGKNKKIAKVLMAIEPKLNYMEIKKIVNEMPDGQYEPENLKRNLYEGYKDYEKDERIIRRCKVQDVVSFMMVEETLKDQLDFNGNVLTLEKITPWEASPFKKPVLCHTIISIPFNTKGGHTDKDYVDFIKNNFEGSYDCEPNKIILKYKVTSKDTKLKDIGKYRMYSHDRRLPGLLIWKYRPNDQNGNEIKFTEIEQEIKAFERRRIEIAQCLYTLEKKVIDSWFTQDELGEEHIPFNKVIDVIKAKMPNFEDKCNVLLKIRNAINHNQFPVYEQAIQTAPGKEIAGKMLRITESYIEQIMAKIDPDFGRTEDAESSR

SEQ ID NO: 20 - protein, 1316 aa, synthetic construct
MPXXNNQKKKADSIKRXSPSPSRINGVAKPRPLVVDENNKHVLGGYFGLGLNNFYKATLSIFARTGIKIASKNGTVLYPEEKIGQVIRVLRRSISDTSGNLTHEEKVWSNAFKLSSSQEMRLQKLIFHHFPILGPIMADEGAYKASTNKKSKVTDAYSMTYGVTLEECLDVLGDLAQTLVDCRNSYTHFYPYNSKESTADQLALQSKTARYLDKVFTASRRLDKDRNNIDTAMMEFITGSARNLRQYVERYGFYPKYDETVTYEKDTRGRERMKKKMTERDDFFYKIGNEKECDGKRYTVLSGFGLSFFCAVFLSKTQTRNMLADIRLFETSPYPKELDDIIRDMMSIYRIRAPRGKKKLEAGNTGVTLALDILNELRRCPRELYDVLTTEGRKFFEDETDRTKDAFVPDDALSPYTSADNASETVKRIRWTDRFPQLVMKYVDETEFFKNIRFQVRLGKYRFKFYDKLCINGEEDLRGLQKEINGFGRIQEMESARKEKYGDMMQPVESERIRIDDDLELDLLQFAEDSRDSSPYITDSRTAYNINNNRIGLYWNELTVNGRTIPKPGDHLPDLGLTPEGKADVDMPAPMAMLSLHELPAMVFYQYLLSQNADPNELKTRSAENLIIGKFNSLRRLFTDISEGRLAPLPEDGLVRVLDDRYGLTLREIPDKLTDFLTGKKGADQSKRRRVVAERTLLESLRKAIRRRDRYEEDRKKIGEKDNKYAKKAYSDVRHGSLGRYLSESLIEWQPTLEGGKDKLTGMNFNKLQAELATFNSPEKYTRLRETLSAAGMLSGPIAHPFLRNVTNRKIRNIEELYLIYLDQEIGYLKTLLNLGYKGGRRDDRNIDFEASTLKTHVDVRKLPLVKGEKRWEKRTPDYCRELAKRYLEVDGRRTSIWLPEGIFSKAITDLLXRHYSGNDGLMDRMRDDSLNNNVAYLINAFFETVLDDHSQPFYMSYDIDKNSGKETPNRFARVYDLFDILNNRKIRNALVKVPMTCNQIAERFTAKNRDGRKRILAEIDDRTAGMTPRDIGSHASLKEAKEAMRRRLTHMIGDVKDNERCVRRYKTQDMILFLMASQLLGDAIRMEKIDSLDKFRLSAVCNAGFLNQTMDFEFPVQMDGNVIYIRQDNMSLKNYGEFYQLLSDDRLPSLLEKLADGGSDRIDYGNLMGELTSYDLHRSRIFKAVHMLERRVTSDRQFRIFLNNPCDRRFYINDDASRMAKRNNFRSLLMLLEQSDTASLTESERNLIISIRNAFSHNHYSIDLPRIAPEKRLRKTTLLNKDTRPLGEKKASLTTIATLIAARLEELQKKLESKH

SEQ ID NO: 21 - protein, 1067 aa, synthetic construct
MNFEENGNKYLFGAFLNTAYDNYNEVISHIYDVIRRITSNNPTEQISSSQALVSAEEQTSSDEKDKNKERMSFVCTFLITGNATSRKIESMLKRAFPFWDDLIEIQTSMSMQLDKTESIFQVQKNCVEELFTALESWRNYTTHYIHPEAIASPTINLLLKSCFNQGIKEIKKRFNAQDEQLKHLYEAEFSYNRETNKDEVKCYHPANYYKFTDESDLLTDKGLAFFTCLFLYKRESYLLLNQLKGFKRADEERYRMTLEAFTVMRFHAPKQLMKLQQQQIDKVSLGISMINELVKCPKELYDCIEDEQKKQFEVYPNAETVPDEQEAIGELIRYKDRYEILMLKALEHSSECKNMGFYLSLGKCYMKCYEKHYIDGTTDNRYIVHPLYGFGRLQNASTDHKNHLSSFGEELQTHSQLPVCHFATEDDAADSPTSVPYISESYPSYVLNNNNIGIKWLNSSEKTEYPNFNLNEGKVSCPTPDYWLSKYELPAMAFYAYLKEKHKNKLQEYPSIKELIDQSQPENTKTSSKTIKSRLEERLKTYKVDAAKKLKRLAEKPDGVQSGRLADELARDILWLQPSSPKEGGKDKLTGANFQALQYALARYGFMRTTLSRIFTTAGLIGSGNAHPFLDKINPQDYSKLTAYYVGYLKQKIVYIDKQLEKLARGKVNIQFHPTRKLIKQSQINTIEPEKETVFLPRNIFTEKIEQALCQIQGNFKSNIERAKTSGKGVNASKLIHFYLELYLKDAVTEFYNIKRKYSCLCYPLIPSEKYNLKEYQNTEERSERIDRIKDFYNFKEVTKKACKGQELSEDEKKLYKKYIELQKVIDNEKMIRLRKVQDITLYLWMRLFIEENPERIVFNKNDRPENSLLKLKEMDNTILDHTTARKINIDTPNGNVTIEDEFKIKDYGRITTLTTEKLPQSLIKFIGILNKPLDKKDRPSLSYSYIYHETNAFYRYRPEIIKMAQDIENKIINELKIDIQPEAEGYYNFRQILEEIKEKSSDINLELLIKIRNAFCHNEYKELDNDQHKYLSSLFKPIADIKQTATLAYLLHMLFETEYQKVMILK

SEQ ID NO: 22 - protein, 953 aa, synthetic construct
MKKKKDSHKADWRDDLISIKHLLVKQEKAKAASAPKKPPAPVALIDLSHMEEQRRELQAEDSSSAKPTKSSAKAAGMKSVFLLSDKELLMTSFGRGNDAVREIRVQGDEVQALRDDPAYRIEKADSGFDIHGRTPTKGYTDDPRYAAEGPPEHRDLIDCRKALEKMYFGEECEDNIHVQLAYSILDIEKILAVHVNNIVYELNNLLRGKEKYYKDWIGYMGKYYTYQEVLRKEFKSKNDEKNLTFVHNMILNVMQDKRRMYFGKILCGPSIAKEDNQEKKKQRYEEEREHAYYIFLILGMARQMLAHGDESTRSLLFCFDEEHDCNKTKEVRIKLRQTLDAVYSERVKELNDEFIDTSSKDLVMLCRVMHARSPEKKKACVRDYYDFVVRKEYKNQGFSVKRLRETIILRTPQAAVVNDAQYDTVRQKLNRLFDFVIFDHYRKHAAEAEQIVASLRAAQSDIDKELIYRHAANNLWQAIGKTVLQDILPMMNGNAIKGIAADPDIKLSMISDIMISDDADYFVKFIYLLTRFQNGKEINDLLTTCINKFENITAFISVMEEQGIFKEFRQEYSMFDNSAAIAKQLREVNSFARMSMKSQDLGLADKLVMFEDAADILGYSDPQAGKQLLDTILNPSQNTGFRNFIASNVVKSNRFHYLACFCNPKTVRKLAENRAVIDFVLSEIPDAQILRYYTACTGAKEGADPGEMRAFLAEKLTGITFEEFRNVKQKDRFASPEEKLDKVRKQAIIRLYLTALYLLVKNMVYVNSRYFLAFQCLARDNALHGYTDNDIKNDPAAFARRFLSEPRHRKNRRAVANIEQNMANSDPWIVREYRNAAMHLSAIRRMPEYIADVKRISSYFELYHYIMQRHLADQHTRKEGEGEEAVKNEVVLRYFADVRKYGSYCKDFLWALNVPFAYNLPRYKNLSIENLFDRNRPGTKAGGPTKSAGPTGA

SEQ ID NO: 23 - protein, 1468 aa, synthetic construct
MKIIRSKGQSFTEHSKDESNTDHLERGLEAKRERKLVHSEHKDKTLFHGRELAQYVGEDHALVLRQAISVLDKVIRPPRRLRDFELQAYVDRAKLAHELWLLVLNKCKGDFTKHPDSDEVQKIFEKTWSERAHPYTRDRVQPLNPCGDENGKYLQSHPKEGVTRQDFEGRWYSALWQENNTTRKPDYATTAQAIIDHLFKQELQFDGQERTKSGHNDDKNKNSGTPEPTGKGLVEARGLTIKDSVNDPRMGKQVTKNADLREASKEIDSHYFGKDIAHQICSAFKNRSENDLDFNPAGEIGALLYNHLPTALGAANGDEHIKSAIWKRHNQVRQFYQKLLRTNRFKRAFRTRDMDKLDNLLPKDTESLTRVLDAKAENAYLSELIRLGKVIAHAADIPLPPVDGENLQDQFKARLEHFATSAGQSEIKRNETFTRLWRTSTALSLRTLTAWVEPILGTNENNNPRNFDITDNNFRGSLNHLLGENTRGDFSWDRIKVIFGQKAYPALCDISDKGRSHIFSSGESQNEWQDHQEVVWALVRLATQIRHGTNHFNVRHRLVDEITGGLLTGDNHPQHFHNRPGNIVHSSMLERFDKLLAFDTRLQWQVLLDDLNAFSITKYLNNPQLTTLLQELIKGQTGTDLATPKFMALLRRAANLARAEEKEYGEEKMPEESEFLSTNALRRFGPLELTDLSKKKDTSLNDVRIDLFRHLYRTGFPAWLEEKRVDDDYLKNAIRAVFDARAFREEAFAEEQRIVAQGTLLESSDVDAISDLSALFATLAANAAGEERLRRNSRARAKTRETVRVQSGGRPDTKEKPSWQATLREDIYGHLFAEYLNEEHLSWIWDIKEPHNPIAEDLKLGEIPDLDQSNRENWESQFYTWLYLVPSDQVSLLRHQLHKTLALDAAADKSVSGSAADEQDRATLSRMSNLMALYTAVQEAGFDGNEHVEAYGEEADYIFYADHDQFKSIHSQDDLTNTVPGTRRGLRQILKFGHLSAVQRIYEKHRVTQAEAEDLIELYGKKRGGEEPQINDFTSRSKLHKEIEGLWEKQQPREKHTTDKDIEDKCKAYKTSAIKMALHNFNIASARLTDHADLHHLLIRVVTRLLDFTLTWERDRNFLYLGMLCDKLRTIEKDDRGSVLSSTLNLELHHLPYVVKKGKSAEKKRWSICLKIGDRHAQESAEIGFSGSDESTIQQALLQEYGLLRLWDDEMGLSLDARDIELDLLPTDHRCLFIKYFVKLAGENEKDVAAREKAPKNKPITDHSQRSGAYSYSYKISKKQIRNDFAHFNILTKERLNLTYLTNAVRSLVSYDRKLKNAVSTAIADIVSDAGLEIQWTLERDRLKKPLVIPRVVHHLAWLPKINGEDVSFYLPARSARFTSMVKALFDFGTEGNVVEIEKDGTGITGRLEYPSALAERYTITKTATDEAGDGGEIPETPAQICLIPSEILTSLENLPQEESKTMIKNRR

SEQ ID NO: 24 - protein, 1152 aa, synthetic construct; identical to SEQ ID NO: 16

SEQ ID NO: 25 - protein, 1116 aa, synthetic construct
MENTIEIQKQSIRTLNNAPQYFGLYLNMARLNIFNISNYLAEKFGLAVLDEEEKITISFLGDKGNKEYKTKQSYIYFNLIKYMPVAKVFDFEKLPKNEIDKTKNNSGKDFNKLSDTLKVIFKELNEFRNDYSHYFSTEKQDKRKLKISSELKDFLNINFSRALSYTKNRLKDVFSDDDFNIASQTVVVNNDNTITQDGIVFLISMFLDMENAFQFINKIIGLKGTQTKAFKAKREVLMTFCVKLPHDKFVSENPQQTFSLELINELNKCPKLLYNVITEEEKQIFKPQIQTEQIENIISNSVPDTIDDYENYIESITKKVRYENRFSYFALKYIDLKELFKKWRFQIDLGKVVLDKYSKQLNGKDEVRTVTENAKAFGRLQDFYDQEKILNKINIGENKTRFYQFAPHYNFDVQNNKIGISKKETTAKFISKNTTHKVKFNLLQPLPEVFLSIHELPKIILLEYLEQGKTEKLINNFIKLSNSTILNKKFIETIKYKLSDLDVFHKRSMGRKEISAYRKDILKYLIARKEKLNQILSEHNLSVKQIPTRILDYWLNIADVQEKTAISDRIKLMKRDCMDRLKAIKKNNAPKIGEMATFLAKDIVDMLISEGKKKKITSFYYDKMQECLVLFADKEKKELFISICSELKLNDADGHPFLKNINLSDIRYTSDLYKIYLQEKADNRNQRNRTDTSWLAKNFYTLKNVEVFDKKQQRKIFKLQTIVELPQDKSKIPFTIRQLEKEKSSFNKWLEYITKGKETTDKKKPVNLPANLFDDTLKKLLKTELSKNNIQYNKEANYNQLFKIWWKEFRKDNTQNFYTAEREYTFEEEKLNFKINTQPKFENYYTRFAENVFNKKQALRNEERKTKRNLPPIQKIHVIKKIRNKIGNTEKEIRMLQEEDRLMLLMFEKLTKENLNLKLEKVNELLNERIEIKEKIPGKLSFDDLGEKTITRNIVETRKRKEYSVLQKYIFDRRLPELFEYFNETDILIEKIKTELDAYNKAKDIVFDLIFKLEEAIIKKDETGIKELNKDQNGNIQTGNIQHKPYLHWLLKKNMITEKEFTFINMVRNTFSHNRFPQKKTMELFIKKWNDNNFAYQILETYKQKTNNIIEKLKDM

SEQ ID NO: 26 - protein, 1180 aa, synthetic construct
MKKKSNIKIMGVKSVHYFNNDVIIENSLSENVEILFKPNYQKIDELKILNSNTNNQTNNRVEFINDNEKKGFTLKKKDSSFEKDKAPKSINSYVNKVKNNSFIHNELFGNKNNNFIPQIYSNFEDIRKIILNYIDHIIYSVNNKIIANKCKIEVDRLSFDDIGMLPATKTYEEYGQTPEQRENMTDVVLPAFKEVLKDNNIKTGNYGNIKVDYWNIVKYAYKKSRCQEYTIRELSNDSLNYINNNINAIAAYSKKVKDYPLLNELNLDRNKYIIHLERKNENEKTAIKKLNNHFSGEEIFKEIYGIEKEFQEKKELYNYLRIISLIRQYCAHFITFDSEEDSIKALINPSNNLIKNFKTSFIKNNEKYLLVLYEYQDFYSELLNKKNINKENNIFTEFYNYLIKDEAKNLGISVDKLQKRYVFNLNIEDDTKKAEYLNKMKVLIKFFITLELKYDKDFNKNDSSDVNSKFYYIEKIKTAKYANNEDIIKALSDKYSDFSIDDYKDEYDSLYNQSKDKIYDELYEKLNVKIDTDKLSDYVIDILGKEENNIIKKFTFDNLKVKYSKIEEEVNEYKKWEKIKNKEKKEIFENQIRDLFPDIFKHINEYNEEYEKNFKNKIKLPNISTDSKFFNLIYFVSEFLTTKDANNLFSTILTKLDSISSLLSLLNSYDSNSNIIGNEFIDYKFMLDNKEINIENICNFKDDIKILKSLRIKDNTKTSKANINDVDFNNIFNSFNDAGMSLEKFNRKIELTTESQEDDYVANNYKELVKYNALSSYKKSVNELNNKKYNKKTLLDLKDEDLKERINNYLSTLDLFKNYNCDKNYIKLVKEAVNYKKKEKPLKQYLRNSIYSSKQYQYIKDYANTRLCKYIIANEKILDYILNDKFDTEGMKKHLYRVYLDYKKEEITKDKIDNNYNNVNINELKKALQEINLKTLSDNILKNIPEDRNLKAIIGLYFEVCYIVIKGLYDVNSAYMIQIQEYEKIYKKCFGASNFSFNTELLKKFEEYEKNRNPESKSLKQIKGIIGDGKFGHEYVREETDDDEKKKKALIYIRFRNTVEHSSLLANSDILKNFNEDESFTKNEFKITSMFQLYHILIQRLLKKDSSNNKDKDGNPNPYYPIGSEFEPDKKGYSTKALIIMNLPYLYNVARFNNLTIEKYYLRRFEGNVKNKKEPNSSSE

SEQ ID NO: 27 - protein, 873 aa, synthetic construct
MGIDYSLTSDCYRGINKSCFAVALNIAYDNCDHKGCRTLLSEVLRSKGGISDEQIKSQVVDGIQKRLKDIRNYFSHYYHAEDCLRFGDQDAVKVFLEEIYKNAESKTVGATKESDYKGVVPPLFELHNGTYMITAAGVIFLASFFCHRSNVYRMLGAVKGFKHTGKEQLSDGQKRDYGFTRRLLAYYALRDSYSVGAEDKTRCFREILSYLSRVPQLAVDWLNEQQLLTPEEKEAFLNQPAEDEGGDISDSSSSDKNKKSKEKRRSLRRDEKFILFAIQFIEGWAAEQGLDVTFARYQKTVEKAENKNQDGKQARAVQLKYRNQGLNPDFNNEWMYYIQNEHAIIQIKLNNKKAVAARISENELKYLVLLIFEEKGNDAVQKLNCYIYSMSQKIEGEWKHRPEDERWMPSFTKRADRTVTPEAVQSRLSYIRKQLQETIEKIGQEEPRNNKWLIYKGKKISMILKFISDSIRDIQRRPNVKQYHILRDALQRLDFDGFYKELQNYVNDGRIAVSLYDQIKGVNDISGLCKKVCELTLERLAGLEAKNGSELRRYIGLEAQEKHPKYGEWNTLQEKAKRFLESQFSIGKNFLRKMFYGDCCQKRCFDEEKGYNTQAKERKSLYSIVKEKLKDIKPIHDDRWYLIDRNPKNYDNKHSRIIRQMCNTYIQDVLCMKMAMWHYEKLISATEFRNKLEWNCIGQGNMGYERYSLWYKTGCGVVIQFTPADFLRLDIIEKPAMIENICQCFVLGNKKLNSGAEKKITWDKFNKDGIAKYRKRQAEAVRAIFAFEEGLKIQEDKWSHERYFPFCNILDEAVKQGKIKDTGKDKEALNRGRNDFFHEEFKSTEDQQAIFQKYFPIVERKDDTKKRRDKKQK

SEQ ID NO: 28 - protein, 1161 aa, synthetic construct; identical to SEQ ID NO: 4

SEQ ID NO: 29 - protein, 1148 aa, synthetic construct; identical to SEQ ID NO: 13

SEQ ID NO: 30 - protein, 804 aa, synthetic construct; identical to SEQ ID NO: 5

SEQ ID NO: 31 - protein, 1127 aa, synthetic construct; identical to SEQ ID NO: 7

SEQ ID NO: 32 - protein, 878 aa, synthetic construct
MAVNYSLREKWYRGVNKCCFTVALNIAVDNCKSKGCETLLKEAEHSKGGITDEQIQQSYTEVEKRLNDIRNYFSHFYHGDECLIFKKDDIVKRFMESVFATAVSNVVGGTKESDYKGVVPPLFEQSNEDYMITAAGVIFLASFFCHRSNVYRMLGAVKGFKHTGKEELSDGQKRDHGFTHRLLAHYSLRDSYSVKIEETKSFRDLLGYLSRVPQQAVDWLNERNELSEDEKKEFLNQKSSEEESPEQPEPENAEWRTEKTSRRSLRKTEKFILFAAKFIEDRAEKEKQDVTFARYQKTVTKEENKNQDGKQARVVRLKYEEDKKDDEKPREHFNLEWMYYIRNEHAIIQIKPKDKEAVAARISENELKYLVLLIFEGKGGDAFNKLSDYIFRMTQKIKSGQINPNEARLPSFLKNPVKNITDKMVRNRLDYIRGQIKDVLEKINMEEPQNNKWLIYKGKKISLVLKFISDGISDIKKRPNVKEYDTLRDTLQKLDFNRFYERLKSYVSDGRLAAALYDKIKGIDDISELCKKVCELMFARLAELEKKGGFELYRYIGMEVQEKDEKYDEWNSPQKKAERFLESQFSIGENFLRESFYSEYCQKQECIDKEISLNTSVKNRKSLVYIVKEKLKDIMPLHNDRWYLIDRNPKDFERKDSKVIKGLCNTYVQDVLCMKMARWYYGQLNPALKNNIKWDETGQGHGYDRYKLSYRTNFGITIEFKLADFTRLDIIEKSDMIENICRSFIKPNRTISWYDFKQDGVEEYRKRQYKAVRAVFAFEESLIIPGRDWLSQGFVPFIKNEEYVKKGFSLFVLDEAVRQLKIKGSDKDAMRQVRNDFFHEQFQAKDEQWKVFEGYLSCFMIDRPKGEKNKKRYNGNKK

SEQ ID NO: 33 - protein, 1027 aa, synthetic construct
MEEKEKISIQTIQDAPYYFSHYANMARHNAFLIVNEINEKVFQRSATKEDELLRESFLVKPPRQQADIIGKIDSLLLHHFPFLAYYENKSAGSARVELKKYMDILNQFRNEVTHYKHPVEPKCIVNLQEVFSSAVEKVQERMIAFSEKDFEHLKPSSSDYRHYILTEAGINTLTDTGLYFFLCLFLEKKYAYKFLAGIKGFKNNTDHTHKVALEVFTQFCCRLPYSKSASSDIALDMLNELNRCPKALYQVIDNEQKELFTVKKEDIVETEQGTEDVPEPVMIRYDDRFPYFALRYFDESEALTDISFQLYLGRKHKKELHRKKLNGEMRTHNLLKEMHVFGKLADYQTEEMTKSFIESKAVEHYAPGYRIVNNRIGVLLKAPEKCSLTSSIPQKTNTAPSAILSTHELAALYLYNRLYKQGSADNSPASIIKKYIENFNRFIKDLQSGKSQPVESGGFRRMRNSNRDEEERLKLQKAKQELQKQLDVYELKVSYLPDACLEYLLSYKKDNKEFMLKDTFRKMWKNADEGLEKIRKKEEQKKEVKQEKLAQELAQDFVYLTPPHKELSENGTEKSVDKKINNMEFDVLKNMLTYFPLYKNRLKPYLNILKDTENKWQHPFLHLVLIYDFDSCNSLKDFYVRYYEYKKIWINKFIQQDKRKRWNLVPKQNVNDLIKKYDYFLKTTVKFKSAKEKEYSKDAIFLPKGLFDAHIAEAMKKQNYEVKETDNAAYFLKVYFDGKSQNYYSLPRYYDASAVGWLTHEARDILKRKIEETWETKNDEEFRNKLKKLSKDIRESETELLHQQTNDRTLFLMVNDLLSGNTNNYKDIVDLGYNNKSENSILNKLYPIKETIHDKIVTAELPIKRYGEFKRFMKDRRLPDLLGYYGEKEIPLKVLETEMETYDRMRKDAIEQIYNFEKLIYDNFESELKKSVDPSALYIDHNHYLNFVKQKFKLETVITEMQSESFRELRNKIEHNQFPPREDWIIDKISQDTTTTIITEKIMNLISTEYKKIWREVESTTSISDME

SEQ ID NO: 34 - protein, 1209 aa, synthetic construct
MKSPSKNPRSEQAVDYDFFVGGRSKSADLTIYYNVAFDSVVKIKKQISNWPDSRQYAFLAEYLWKAHYLQKNSNGYEVQPIDEWIIQALIAKVEAIRNFHSHIWHDHEVLIFEKELKDFVEQKYDEAKAALSAEFPGAMLEYEDLARTGRMKKFSLFKRVPERKKDFITVEGRIFFLSFFLSTGEMNQLLQQRRGFKRSDMPLFKMKRLLYTFYCHRDGASMLDFNHKEQFIDSMDEQQKRDIFKARTAYKLISYLIDYPWYWGSRDSMPLFDEKGEIIRNVGQLKDYLEKNPHLLPELNFHLLDRKIPATGKFNTRKEKENFAKLQDDRYRLGTIAFNYLPIPNYTFHIDFETLHRLVLLQILHHGSKKEVSPYQVLELNLRSIVENRVSLYNILCKQDNERTGEDLDFLLDRKNQRLRGGRKLTEFGISYFESIEKGSGAKIRDSIQLANYMRSMDTAWLELPYEGAHKVEIQPLDPEPIMVYQQDFLEGTTQKFRAGNRFMFYVSRYLMDFAGDNWYWGMERFEMRKKDQNARSESLIRTKEYLRASDIPLNGDYRLTLDNDHIFLAMPKNGPGKKNHEKFYQFALGPRAMRYLGAYIINNRADFVSKAKGFLDTLVRDLDRLHKNEYWNMEHGYELLESPFVSGFLKNVPTNIEKLLTLVKTRIEYIKQEWQQALENKPYLSRAQKNKLIMDAYRLLQWPKGNDGNPRFFRAHEYNQMSVCHYSLHLKDNEQDKESRKQIKKRFKSKYDHLFEDVFKLNTRKPPIPRSILSLLDEADSLDELMKKTFEECHQLLDNRYSQLKSLPNQQLKRELPELCRLLGISVPLNILREQEKKALKEKHNTTLCVKPFDIHPMLVVKYFFPEQYKASKSVEFVNKNGEKVKKQPTLTIFSALRKNRALREKLVEDFYDEQNSAVLYPDDDTKKQKEVLTGLMNTTCTEDILLWWMANEYLVNNPYTQAMGELLMKKPRSGRQYIGDLHKLTILQPLPKESGKRQIYMSILMHQLDDLMFIVQKSRLGKAAEHFVQRCSTENGIWAPEIEKLSTNQLAGAPFPDGTINNPIPFQLLLDEIELVRRTGLELGRYLLEFEKKILQQALNGYESKEAFHKWLKNEYEKTEYYGKYPAYFFNFDSILKLSGTVDNNIDKDLNITLSDYRNITFHNDIPSNGSFSWLTREGSSVRQLLGIEKNLHEKRDRSEYENNREE

SEQ ID NO: 35 - protein, 798 aa, synthetic construct
MEKEQGLYSIDRYQGAGKWCFAIGANRAWDNYNERPKLFSESLLRYEKATRRDWFDEETRGLIKKSDVRQRLRKIRCYFSHYCHDNTCLGFDPDDDLRKIMEKAYERAIFEQRKHLSTETDIETPALFEPHGRITAAGVVFFCSFFVERRILNRLMGRIPGFKKTEGEYGATRQMFSKYCLRDSYSIRASDSNAVLFRDILGYLSRAPSQYYRHNKDQCDKDGHPERKKDKFINLALRYLESFVPARLRNHTLSVGRKEVVRMETNAVAEGEGEYRPYPPKAKVKVVFTEDDPERPYYITHNTVILQTAKKEEDIHHCKVGVNELKYLVLLCLQGKAEKAVAGIEGYVRRIQGRFADHTNKVARDDDERLVRGLPEFVRVASGIETPDEVRELKSRLDHIRKKWQTKKAESAEAQLHRKARDVLRHINWESQRPLGIEQYNRLLELLVNRDLESFAAEMKELKRRGLISEELLKSVEGIRNLNTLHVKVCNLVLTRLEHLVENDPEELKRHIGIVPREEKEGPSYEEKVRAFVQQPMMYRGFLRNSFFKGSGKSFAKLVEEELHKKGCPDVPLGTDYYLVRDLERDERKNRFHNDNAALYETLALDRLCVLMARDCLVRLNRNLEKHATRISWEATDAGDTICLELPRRDRDHESFRLSFGVRDYPKLYVMDDPVFLCGLMKHFFPDNQAIQYHELYSEGINKYTAMQAEGIAATLKLEEKTIKEKNMQIPATGYIRFCEIVSQSDFAPGEKRVLKNVRNGLLHYHLEFEPTEWAEFREIMKREGFDTAKKRKSTRKK

SEQ ID NO: 36 - protein, 1138 aa, synthetic construct; identical to SEQ ID NO: 12

SEQ ID NO: 37 - protein, 1085 aa, synthetic construct
MKKELNREDVFTGGKTPELTIYYNIAYFRMAGLINALCGNKLERDKDALEQFMKAFINGKQKLTDMQFVKLCDYLWKGYKYDKNRSEYSLTENDKTMVLKMVAKLQDIRNFQSHIWHDNKVLVFDADLVQFIKNKHLEAIDAQRQRFSKETEVYEKENRELKKKKNKELLFDIHDGLGYITGEGRNFFLSFFLTRGEMTRFLKQRKGCKRDDTPEYKIKHLVYRHFTHRDGATRTHYGYEDNMLDQLPDKQEFLTTRHTYRLINYLNDIPEEVTNPELFPLFNTISNGILIKESVGTYIAFINKMPLLSDFEFSEVWGKDGKPYTNLVEFYHKTQPGFKFRTDLNSFHKIILNLIRDENYTGFFTTQLNLFMAHREELILVISKPLITPNDLLLIEEHYRYKLKANDFVREKLGEWKEKIEKGKWEKANEQKDKLINLLGGVIEITFYDFYWQKDEKPRNENRFMEFAIRFMADFNLLPDCEWEVEPLQIENDLIANRTATPDLKKSGSQFMNQLTDNYRLKFNDGQIAFRYQNQVFIMGHKAVKNLLIACFDGKEKMLNGFMPALLADLKKITNEHILKNHQALNTLSLLNNDSIPSYISRQWGEAEPITDMKKKAIARMDYITQQFEALIENHHYLNRADKNRQIMRCYKFFEWQYPQNSQFKFLRRNEYHRMSIYHYCLDKEQHKYDKKGHNYLYNRLIKESHNESGNIEQHLPYQIRTMLNDAKDFNDYFLRILNATHKILTDWKNQLKQGREPNNYYLSRLGFTGGLTQKVVHTRLLPFSIHPGIPVSFFYRTEMNQNPSFNLSAKVWNSESPFRVGLKESNYQYAKYLGLFNEIKTQRKIIGKMNQLIAEDALLWQIAKKYLDKCHPKFSEIINQQVNGKQPLNVKAIHDTELTIDFPVDKNLYQVVVKMKQLDDFMFIDSKPVLEKTIRYMIKNSLRDKEYQQRVFIETNPGVFKIPYNEVVEAMRTINHQALTWARLLLDWESKTVKTIPEADKKAKLQEAYNKRQPAFFNFNDICRYADDGKQLKDLRNKTFHTEVPETWTYDEMRENKTIKMVLGINETTFLKKDYAIENARTIE

SEQ ID NO: 38 - protein, 1103 aa, synthetic construct
MRKNYQTKPKAPISTDQLFTGAKTPEYAVFYNIAYWWMSEMLKRLYKNTDTSIHEDTSPFIQRFVNDGEEINSSIFSDADYIKLRDYLWKGYLFDKNKSGSIITFKDKVIIHKIIAKLAEIRNFHSHYWHDNSILKCDEDLKSWIDFLHNYAVDKLRVEYSKEIERYESNRDNLFDMHGSDYFITQEGRNFFLSFFLKKSEMSRFMQQRKGCKRNDKPEFMIKHQVYRYYTHRDGASRNRYSIEETVFSALDPDSKSEINKARQVYKMLAYLNDIPSEVIDKKLFPLLLNDEIVEDSTQIIKFIKKHNLFSNCKFGIIEDSKGEVIQKEVLFSYVDSKYNFRIRIAALHKLILDIIRNSKREEEFYNTLKTFGDFRDQFPIILDDIKKGIGNIEELNEYYIFKLKADDKTRGLLGKVIDDYNKNQFIKLKDYNELKEKSVDEPIQLIYHNFYFESGQKPRSGNQFMEFAVKYLMDKNLVPNWEWLLEKYESEEVEKKLENNNPKKVVKHIKAYFSYIPDGYRLHFKEDHVLLRLKYESEIIIEVGENAMKNLLITHFHGKPINEVVEKTVSDINKIKHVAKNNKTLTEKLELLNDKTIPRYLKLMMHDESVMQNETINYSIIQAKNRIDRLIEYFEDLHSDKVKLNRREINIQLIRCYKYFDWNYPNNSEYKFLRQNEYQLMSIYHYTLAKPKNAKHHLLILRKELFGDINKHLPTNLKLILEEATSIDELFKTVLLETISRLNKWKNRFSSMNSNQKKDCLSKLGIHIPKIPVPDASNKANLGQMKNLPFMLHPSLVFMTFKYSRSSTIFSEYRDNPKNSKGLLMDHYNFQSYLDLHSVLIDQKQAHKIVGTINNLKTLDTLIWQMTKKYLDDTTSDILKNITNELINSSTENFNVNQLHNFEFPIFKSDKSEVKPFKVIVKFKQLADFMLITEKPLKNVALQLFKRYQTNEELEKLEVYFKNGFYEIPYVQIKQEMDRIYRESLILADFILDWEKSIVDKIPEIEKQKLIESAKQNTNGYKAYINFDTVCNYAGLIKEEQSELQNLRNHALHAKIPDKDWTYKQKLNDNRIQKMLYITLEKLEKYEKKNAYYESKVLHNTY

SEQ ID NO: 39 - protein, 1092 aa, synthetic construct; identical to SEQ ID NO: 15

SEQ ID NO: 40 - protein, 1133 aa, synthetic construct
MKTNPLIASSGEKPNYKKFNTESDKSFKKIFQNKGSIAPIAEKACKNFEIKSKSPVNRDGRLHYFSVGHAFKNIDSKNVFRYELDESQMDMKPTQFLALQKEFFDFQGALNGLLKHIRNVNSHYVHTFEKLEIQSINQKLITFLIEAFELAVIHSYLNEEELSYEAYKDDPQSGQKLVQFLCDKFYPNKEHEVEERKTILAKNKRQALEHLLFIEVTSDIDWKLFEKHKVFTISNGKYLSFHACLFLLSLFLYKSEANQLISKIKGFKRNDDNQYRSKRQIFTFFSKKFTSQDVNSEEQHLVKFRDVIQYLNHYPSAWNKHLELKSGYPQMTDKLMRYIVEAEIYRSFPDQTDNHRFLLFAIREFFGQSCLDTWTGNTPINFSNQEQKGFSYEINTSAEIKDIETKLKALVLKGPLNFKEKKEQNRLEKDLRREKKEQPTNRVKEKLLTRIQHNMLYVSYGRNQDRFMDFAARFLAETDYFGKDAKFKMYQFYTSDEQRDHLKEQKKELPKKEFEKLKYHQSKLVDYFTYAEQQARYPDWDTPFVVENNAIQIKVTLFNGAKKIVSVQRNLMLYLLEDALYSEKRENAGKGLISGYFVHHQKELKDQLDILEKETEISREQKREFKKLLPKRLLHRYSPAQINDTTEWNPMEVILEEAKAQEQRYQLLLEKAILHQTEEDFLKRNKGKQFKLRFVRKAWHLMYLKELYMNKVAEHGHHKSFHITKEEFNDFCRWMFAFDEVPKYKEYLCDYFSQKGFFNNAEFKDLIESSTSLNDLYEKTKQRFEGWSKDLTKQSDENKYLLANYESMLKDDMLYVNISHFISYLESKGKINRNAHGHIAYKALNNVPHLIEEYYYKDRLAPEEYKSHGKLYNKLKTVKLEDALLYEMAMHYLSLEPALVPKVKTKVKDILSSNIAFDIKDAAGHHLYHLLIPFHKIDSFVALINHQSQQEKDPDKTSFLAKIQPYLEKVKNSKDLKAVYHYYKDTPHTLRYEDLNMIHSHIVSQSVQFTKVALKLEEYFIAKKSITLQIARQISYSEIADLSNYFTDEVRNTAFHFDVPETAYSMILQGIESEFLDREIKPQKPKSLSELSTQQVSVCTAFLETLHNNLFDRKDDKKERLSKARERYFEQIN

SEQ ID NO: 41 - protein, 1316 aa, synthetic construct; identical to SEQ ID NO: 20

SEQ ID NO: 42 - protein, 986 aa, synthetic construct
MKTNQPKTIYYNWKDKADFAYFAFYTSQALNNTSIILKNISEIIENKVDKTNDDNQLFSNAQVIKILESNNSVAQKSVINLLDSNLPFSVKSISDPFLVKNRLSYFLWLLKNFRNEYAHYHERELDSRTTLDREEDFKKRENLNKRFSKYDFADELLKLKKSAVEELEKRLKINNKELESDSVYKSFKNRFLKISSRQNFTEEDFIFFLCLFLSTKETMQLLNGIKGKKNTTTEEFQWIRRVFTIFNAKRFQNKIKSDNPKEAFILNIVNDLAKIPIHLKKYLTEEAKEKLIYTVQETEDEEGNILEQKSEAVTKHDKMFSYRCLQYLELFGFAKNINFNINLGKVFINKPYKKTIINDEYDRFLDKEIHTFGKLKDFDDSYFEGYIERKETENGVVTTFKQPLKFYSPKYHFSNNRIGIKLYNKNLKLELKEYDEDGKFVVINNQPDYFLSENAIPYFTYCMINFGEDKTLGVIKNFETNFKRFLNDVSIGKSIKVQEIEQNYSLKIGWIPSLIRDNLFHDNDKTFEDVVKEKINSLKEETQKLIENNNKKPEDRDRNIKFSFKKGDLATFVAKDIIYFMELKEEIVNGKKVVSKLSSIEYDVLQSKLAFYGKHEEDLKLLFKKWNLNERHPFLKDVSMEKVEDRRGFKRQIGIKKFFKNYIYQRKYWLNDLKLEINKENYHFVDDYKVCKNDTQIKAYASNLLNHTIYLPNDLFSDLILENSNFAVEKANTNFLISKNLEYFGNQWFYNKENYQQGLDTYQSHLRDKQIRKAITLDRLYWNMLKINTQIPEFSQIFEQNNLAAYNSEQTLLEKQIRMSSNFKLAKEDFRYLDFDRDFEIKIEGYRKIKDFGIFRHLIKDRRVPSILAFYTKYKKLGSINEEIIRNEILDFEYYKISILKRVLEIDKQIYNNLIGKNISIHEKFSENVNKLYLENQKLANKIIEIRNKLLHNKVPEINLENIQKTFSETLFLEMEKSCNELERLI

SEQ ID NO: 43 - protein, 1067 aa, synthetic construct; identical to SEQ ID NO: 21

SEQ ID NO: 44 - protein, 1062 aa, synthetic construct; identical to SEQ ID NO: 9

SEQ ID NO: 45 - protein, 1063 aa, synthetic construct; identical to SEQ ID NO: 19

SEQ ID NO: 46 - protein, 809 aa, synthetic construct; identical to SEQ ID NO: 6

SEQ ID NO: 47 - protein, 1146 aa, synthetic construct; identical to SEQ ID NO: 17

SEQ ID NO: 48 - protein, 1057 aa, synthetic construct
MEENKVRFTNTSNVKRPKSLLKQMGHKSTFLLDDTLIVTSVAKGKNEDQKGKEQAASKSKVAPQSHIELLSTIDGEVLGGRKELLATTVSRQEVTISGKIYNLNTKTPESTTVTMANPAVLLQKNSSTTQVARKTDYLGIKSALEKEFFNDFSNSGFNDNVRVQIAYNILDIRKILATTINNIVSMFYNLDRTTGDIADETKKSTNTDIIGMIKTYLKYDQAKNSNDPSIKKTFNKAEELLINTKAYHTYFDRLFTTPTRQAFKAGKLKDTNDKKSNLPCEFSKLSEKDQEEFKNEAITHNYDVLRLLGLGRQLVVHEKYKSDEHNKDNSIESLFNIDKIIRNSNDTMDLLKRLDNIYLESAEQIDNSFKKSSATNCLILEELYKRIGKAKTQAELYKDYYRYAILKEDQCLGISFNRIKEAVLEKLKEEQRYKNFEYRNDNKRFYTLCNFVLWHYMVDLRDRNETRAGHQQTDRNEIEELKSKLRACCDNNGDGGENQKYAIYKEFVNFHWTDLRTSINTLYDLCVKYKYTAKNYRIDSKIQIDNQLSSSANNVKTFVKYIYFLSEFLDGKEVNVFFNELVEKFSNIAEIVTTVNDNINNSSKKSPNISFLPQYSLFQEAGTVADQLRNARNIKHATLRARINDKVADKDSKMSPSKQTISDALYMLIDENDTIENYKQLIWDEKESGTWVKKATGNNKVRNFIINNIIMSKWFMYISKYSDPRNCSKIMHNKEAVVFAMSSIPDAQIEKYYKRVTAKSVQYGNKTAEEMRSIVIDALMNFSLKPVLTGVANNDYSNENRERDIGIIQLYLTVAYIVTKSLVNVNKRFLLAFSCLERDVPLILNGKSFKDANILVLSEKFIAEDQEIEQKYKLAKKNRITPNMSKEDVKNVFKELNAEYKSKHYAESLTRPRDPDSKKDKSCAYLVNNLNEAKKIENVLMDFKNKVDHLNVVKSAPEYMSNIKNIDSFYGIFCFALQNILADKMIKWSVNEKNSKEDVEIINSYGQELKKKLDSRHTFDRDAMWIINMPFAYNFPRYKNLSSEYLFYDKEYEKTKK

SEQ ID NO: 49 - protein, 1124 aa, synthetic construct
MKIPQIIENNKHLFGAYSTMALSNIRNILDHIATLADIENDFYSDSDSYWYHPCIKIIDPRNNCTDAAKADFVIEKIKSHFPFVPIVAEAQRQSDILRAKKQLDIAVRNRDYQKQEELKHRQKSLLSVTNADIYRVLNNMLWVLANYRNQTVHYLISDIKFEDGSDFLNYNEQPLSRMLNNYFTIALRDTANKYSYSPEALSFIQSSRYKTENRRKILDTDFFLSIQHNNSDTNPKNLHLSGVGVALLICLFLEKKYVNVFLQKLPIYGPYKKQSMEANIIRQSFSIHTVKLPKERIVSEKSDFTIALDMLNELKRCPKQLFSTLSYADQNAFRIVSSDMSDVLQVRHTDRFAQLSLEYIDRRELFSDIRFHLNMGKLRYLKTADKHCIDGVSRVRVLEGKINAFGRIHEFEARRKEQGFVEWHEQAARLIKTNKNIEIRDFEHVKRDDATPDSYPYIIDTYTHYLLENNKIEMRFGDYLPKLVKVDDQKWTVYNEMPTCCMSALELPAMMFHMMLCGSEATEHLIKAEVEKYKKLFGAMANGTLSKENIGNFEIAMEDLPKKVIDCVNRKKSGKSFVKQIKKEIAEMLADTNLRIVRLKSDKRSVASTQNKMGKRGFRSIQPGKLADWLAADIVKHQPSLFSGDDYGTDRITGMNYRVMQSTIATFNAATPEHSLDELKRVFSAAQLIQCQEREHPFLQKALNRNPQNTIDFYEFYLQAKRAYYQSLRQSIENGEDVKLPYLNPDRNKWVRRGASFYSTMGDIYLEDMPIELPRQMFDKEIKKALAQLPSMKGVDMKQSNVTFLIAEYLKRELKDDFQPFYQWNRNYRFTDMMICEENCDTKALASKFIPLELREEIWEKRGELKDAYKRWAFGRLNKNPDIKRLSPAEKDELLEKRIAKCRNEYQKSEKIIRRYKVQDVLMFMMVKSMFAQGVFTAESKEFALSTITPDAERGILSEVVPIDFKFSIDGKTYTIHSNGMKIKNYGDFYKLINDKRMKSLLNIVTHSTIEKDLLEKEFSTYDDKRPEAVEIIFEFEKAAYEKHPELKELLTPERKFDFRALLEELQAKSDLSQIDARYLSQIRNAFNHNAYPRNLKITSNIPEIAQEMVNIFRITDPYKKGKK

SEQ ID NO: 50 - protein, 1113 aa, synthetic construct
MESLIQQEENKARNLIDDPQYFGGYLNMARHNIFSINNHLASYFGTSGLSNEEQIPDSFLLSADKRRNQETKELIKENLLFERTLRFMPIFRIFDTERLPKEVRLNTENMEKDFDEMRKCLKQVFSELNIFRNDYTHYFSTNTETTRKLQVTPELEEFLSRSFKLAIAFTKQRMRDVLKEEDYSLVEKKVMVLPEERVITTEGIVFLACMFLEREYAFQFIGKVVGLKGTHRNEFIATREVLMAYCVKLPHDKFISEDSKQALILDIANELNKCPLTLYDVITEDGRKQFRPELTDDAKKSVIENCINEDLEVDYDEYIQILTKKVRYKNRFPYFAFQYIEETKLLDNFRFSIDLGQFVLAEYEKRMAGEPTSRIVVENVKAFKYLKEVTDEDVVLGLMKSNPPSNRFLQFSPHYNSDNNKIGISSKPQTSVVKSKGKIDSKIEYKIKQPLPRAFVSIHELPKIILLDYLSKGSVVKIINSFIRTNKSIILDVDKIKEIKEKLPNNEVWFPFRRMTDSKKHSAYSEKQKAEILRRKKLLNEILSSYSLNIKQIPSRIIDYWLNIIDVRKERSFSDRIKLMKRDCADRYKAVKRNEKDKTVAIPKIGEMATFLAKDIVAMIVDEDKKSKITSFYYDKMQECLALYANIEKKNLFIHLVTNELKLNEKGGHPFLKRINLNSITRTKELYEIYLSEKAYKLNSKENDESWMSMTFYHLEWNEKAKKKMTKVVYPVNDEQIPYTIKQWNKPQQPLFDRFTNEQGKSSDWVRLKPLDLPTNLFDEEICVQLRSRLQEAKIPFDNISNYSELLKLWWKSRDDSTQPFYLLERQYNIYDESVRFTLNSKNKFKDYYQAALKKVFNQKKAEREAKRRFNKRLPDIQFKDVERVFKHAIAETEKQIRIIQEEDRIMLLMLEKLMDDQQLKLGKAETLLSSTVPVKQKIGDKTNSSRVIVAQRKQKHYTVLRKYQYDRRLPELFKYTTEKEELKLEWLEDELKAYNKGKLKVFDLVFSLEKRIIEVAKQDIIALLDKSGSNDSKFNVDHKPYIKWLENMELINSKEAGFMKKIRNSFSHNQFPECQTVELMISLKSDIPIATQIVNEYERLILRISSQIEKMK

SEQ ID NO: 51 - protein, 1133 aa, synthetic construct
MEKELIVNENRERTLKDDPQYFGGYLNMARLNIFNISNHIAKRFGFTILPNEERISSSFLCNKALKNADWNHIHSRTKRFLPIIKVFDAESLPKTEYDFLMWEGKNFALMTDTLKSVFSEIQEFRNDYSHFYSTEKGTIRKTKISPQLASFLEVNFKRAIEYSKIRLKDVLREEDFNLVERLKVCNNGSEITTEGLVFLICMFLEREHAFQFIGKVKGLKGTQYPSFIATRETLMSFCVKLPHDKFVSEDPKQSLILDIVNELNRCPKTLYEIISEEDRKQFRPELDIKSVDNLLKNSGKEELLDTMEFEEYMESLTKRVRHSNRFPYFALRFIEEMKLLNNMQLHIHLGKFELQKYDKQLNNEPFERAIIEDAKAFGYLKDFNDENDIKGEIVSGKDSEGFAQFSPSYFLKYNKIGIRYKRDIPHLIVDKNNSKGAYNLKQPLAKAFLSAYELPKIILMEYLQKGRAGELIDDFIQLNDNKIMTWDFIENIKSQLPDWKTFNKKSFGLKDKKGYQTEELKELNTRKNQLNKLLAPEGLNHNRIPERITDYWLNIGDVKKKRSFSDHIKLMKREGMERLKQLEKFKKEGKGKIPKVGEMATFLASDIVNMVINEERKNKITSFYYDKMQQCLALYADSEKKALFIQIIKELKLNEEGGHPFLKKIDLQKISKTSQLYELYLTEKVNKPIREEVFKYDRKKGYKVTKIILRDKSWMGEMFYTTEKSEKTGKDITIVRMPENKTEIPFTIRRWEEKQKTDLKVWFHNVTKGKDKTKDGPKAISLPTDIFDDEICTLIKIQLDKINVKYKENLKYNELLKLWWWKSREDDVQNFYHSKRLYKVYDEEINFTPDTKSTFVEYYEKALNSAFEKLSKARKKERKTHRALPDINKKEVEKVFKRAIGETEKDIRILQEEDRISILMLEMLMDNATLKLKNISYLLNDTTRIQQSITAHLSFDENGESIKEGTKPTITKTIIADRKQKNYTVLRKFIFDRRMPELFEYYASNEVALDWVTDELRAYNTAKQYVFDNVFNLEQKLIEKDETGIKAMYTNKEGTPITGNIQYKPYVRWLENKGLINKNQKRFLTMTRNCFAHNQFPQKKTVLRIVPNLTDNNIALQIADAYKNITDEILTKL

SEQ ID NO: 52 - protein, 1123 aa, synthetic construct
MDAEGKNERTLQDDPQYFGGYLNMARLNIFNISNHVADKLSIALLKNEEDINNSFLCNSNQKLNWSKAYAMTMRFMPLLKVFDTERLPEHRTSQKDKEKGKEFGIMCDSLRIVFRELNQFRNDYSHYTSTEDNFTRKIEISPELAEFLTCNFKRAIEYTKQRFADTYQNEDFILAERMQMVKSNIITTEGIVFLTSLFLEREHAFLFIGKVKGLKGTQYKQFKATREVFMSYCVNLPQDKLISDDYTQSLTMDIINELTKCPETLYNVLDESARKQFIPQLGEVETDNVRQNSINEAELTDENDYAQYMEDITKRVRHSNRFPYFALRFIDELDLLGKFKFQLDLGKLKLNTYPKPYMGEDVDRAITENVSAFGKLSDHQVKEEVQAKVVKDYSSVQFDQFAPHYNMECNKIGISRKSETAIVIKPSETGVKSAYKLKQPIPEAFLSIKELSKIVLLEYLSPGESQRFITDFICTNSDKLMNLDFIKEVKGKLPVFDKPFYKKVTIKRKSYTKHELTDLEARKNLLDQVLVTYGLNTKQIPTRITEYWLNIRDVRNQYIISERIKSMRKDCTTRLKSLKKLDETGKGKVPKIGEMASFLARDIVSLVIDPVKKKKITSFYYDKLQASLALFADPDKKKEFMHLVKDELNLLSVGGHPFLINIDFTTIHYTRDLYKKYLEEKGCKITNDRKDISWIFNTFYKKEPGKNSSLPVTKVKLPLDKNGNPDSKRLPHSLYSLGNRKTDNSIEEIEKWLSNVKHGKMKTDCTKPVDLPTNLFDSRLIELLQKETGDTSLAPKLNGLFVTWWKKRGDSTQSFYNDKRNYVIYDQEVCFLPNTKKLYQDYYQSALDRAFRLKREERRQERLLNIRLPDIQLKDMKKIFNITLSETEKEIRILQEEDRLLLLILEKLMEKEIAGTLNLKNVNDLLNEQVDICQQVKTYLSFKENGELASKDERMQITKNIISYGSRKNYGLLRRYVHDRRMPELFEYYPTDDIPFEAIKQELEAYNKAKQIVFDKVFELERALTERFKDEVMAHFVNRDGGSRLKGNIQHSPYLNLLESKGIISKDAHRFLKAVRNAFSHNQYPHKKTMEIFVKEWNTSNFANQIVDIYKQKIDEVIDNIKK

SEQ ID NO: 53 - protein, 1000 aa, synthetic construct
MEEANRYIYGAYFNMARDNFLNTIKLLADKMKLGATSGFGKDGNEVNDINELFGDKNTYANIENVVEFYFPWIKALEGRFSLDKGDRNLNDMKMFYKSVLTAFFTAVDSLRNKYTHYSHKDLNIREIKIECTLGGKDYCIGLLNALDCIYDSAVNLLKLRFMADEDEVAHLRRCKAVNKKVVVRTEKDGFYYRLSDNGEVTEKGVIFIASMFLNRKYGFLFLKQLEGFKRSDEKRYRLTLEAFLAFSNIKPVDRLKSDKLDRASLGLDMLNELTKIPKELSETLSVDCLYKYLASDGEDDLRSRIRYQDRFVPLALEFISQSDEFKDFRFYTYVGNYVYKGYIKRLIDGTDKERYLSDRLCGFYKSVNDASSDAIAQKYGVEIKDSNEPDYMLPDSFRPHVLRATPHFVINNNNIGIKICGNDCLPVVNGKGVESPEPDYWLSIYELPAMLFYAYLREKNGKLLKDYKSIRELIEDVEKKADEKNDRDKGALMARHIDKEIIWTQTKLDEVKRLEEKKVAAYGKKGRVVLKSGRMADLLAHDMVRLQPATKGSDKITGANFQALQVSLAYFKRDILADVFSRAMLTTGNHRHPFLYRIDVSHCSSLRDFYVAYLGERRKYFEDVAKKITKNKLNTPCHILRRLQREGSGEEAGKDVKPKFLPRGIFTGSIKSCLEKSALNINIRNARNDVKPAINAAYLIFMYYKEIEKGEFQGFYGEKRRYDILEEGKPLDLDERKKALASIKPAKIDVSEANMPMSKEEHLMRKRYHAVCNNESAIRMYQVQDILLLLMAKDIFKKALSEVVMSKKIGLENLNGIFDAPVNFVKNFDNIKLTATGIKIKDYGKVCRLGTDFKFNSLIKAFHKVYSKSVEMDYSDYLKEEEEFEKYRLNMVKLCREVERGITEDLHLSLDGKSHLSFNDDVIKSYNDKYNVFNGDDLTFFINARNMFMHGDYKYECVKYVVSEHFKGSLNDVSFAKETYGHFCNLLESMRKKTGLRIDI

SEQ ID NO: 54 - protein, 926 aa, synthetic construct
MTETKSKREDIAKPPAAKSRSKAAGLKSTFAVNGSVLLTSFGRGNDAVPEKLITEKAVSELNTVKPRFSVEKPATSYSSSFGIKSHISATADNPLAGRAPVGEDAIRAKEVLEQRVFGKTFPDDNIHIQLIYNILDIRKILSTYANNVVFTINSMRRLDEYDREQDYLGYLYTGNSYERLLDIADKYAVDGEDWRNTAAGISNDFEKKQFQTINGFWDLLDMIEPYICYFSEAFFCETTVKNPDSGRIVPCLEQRSDGDIYNILRILSIVRQTCMHDNASMRTVMFTLGQNSVRDRKNGFDELAELLDYLYDEKIDIVNRDFLRNQKNNIELLSRIYGSSADSPERDRLVQNFYDFRVLSQDKNLGFSIKKLREKLLDSPALSVVRSKKYDTMRSKIYSLIDFMIYRKFSENHVAVDDFVEELRSLLTEDEKESAYSRWAETLINDGFAQEILVKLLPQTDPAVIGKIKGKKLLNDSIAGIKLKKDASFFTKIINVLCMFQDGKEINELVSSLVNKFANIQSFVDVMRSQGIDCGFTADYAMFAESGRISRELHILKGIARMQHSIAGLGDVKIYSSDDKFHGVSRRVYTDAAYILGFGERSEDNDGYVDDYVSSKLLGGADKNLRNFITNNVIKNRRFLYTVRYMNPKRAKKLVQNDALVVLALSGIPETQIDRYYKSCIEKRSFNPDLNEKIAALSEMITTLKIDDFEDVKQNPEKNANYEAKKNQRISKERYKACIGLYLTVLYLICKNLVKINARYSIAIGCLERDTQLHGVDFKGAAYMTRDVFIAKGWINPKKPTVKSIKEQYAFLTPYIFTTYRNMIAHLAAVTNAYKYIPQMDRFKSWFHLYHTVIQHSLIQQYEYDRDYGRKGAPVVSERVLQLLEQCREHSNYSRDLLHILNLPFGYNLPRYLNLSSEKYFDANAI

SEQ ID NO: 55 - protein, 1094 aa, synthetic construct
MNIPTIIEQKKQFFGTYSVMALLNVQTVLDHIQKLADIEDIPCYDENGKEKDKRENLWEHSVMLYINYKNNSIQKAPEKTALIIDKLMAYFPFLKIMAENQRTHKNKKYQQNRLEVNSDDVFDVLNCLFRVVKKYRDTTTHYMLHDECWDDNSKFLRCSEQILATMLNKYYDVALRNMKERYGYTTEELAFIQNHRYKIEWEPDSRKRPQSNTRFFFSLVDNNGDANPDTLHLSGVGVAVLICLLLDKQYINLFAQQLPAIQKFEPQSAARKMLVRSMGIHSIVLPKDRIHSQKDNMSIAMDMINEMKRCPKELFDTLSPSDQSRFRVTSSDHNEVLFLRHNDRFAQLALQYIDYCKWFNGIRFHVNMGKLRYLFNAEKNCIDGINRVRVIEHALNGFGRIDEMEDLRKSEVGTFANTGVAIRDFENVKRDDADPNNYPYIVDTYTHYILENNKIEMLLTDTNSLPTITEKGGKWYVGKKAPTCRMSIFELPAMMFHAILLGNQATEKRIKTVCANYSRLFEALKQGAVNKDNIASFGIAEEDIPQKVLDIVNGCAQGKDVNIFIKKNIDEMLHDTERRLERLREDREAVNANDNRMGKRGFRQIQRGKLASFLAEDIVKLQPTLCNGTDKLTGLNYRVLQASLAVYDSGGMNEARQQFKALFVKAHLLGTDPHTCHPFLHKVFARSIPDNTIDFYERYLAERESYLSTIQKKVAMGKAVNVPFINRAQSKWSAPTQEALGNAYTDDMAIELPRQMFDDEIKAHLKTLPEMADIDFDNANITFLIGEYQKRVLHDNVQHFYSWQRNYRYIDMLKCETDRKNCLCSTYTSVEEREALWGRRKECIEKYRQWFTRKTSNDRGRSLISAVDIEEILDKRLSNARNEYQKCEKTIRRFKVQDTLLFILAKKALTNFADYNGERFCLNDITPEGDKGILSQLMPMIFRFEKKGKVYTIKSESMKPKNYGDFFVIANDNRICNLLDLIEDNIVSKEDIDKELQKYDQCRPEMAKLVLDLEKWTYSKSPGLMYKEKVQFKDVLDELCKHTNLTERQKFVLGKVRNAFEHNDYPEKGILEITTLPQIAARMKDLFDEYAEVE

SEQ ID NO: 56 - protein, 1158 aa, synthetic construct
MKEKIKNKSSIIRIIMSNYDDKGLKEFKVLYNKQGGVDTFTCKTDIVDGTIIFLEIEKHLRDFGDDFSWDISSDGKSVEITKLINGKETRKYKVSIKNSSTKDKKNLVELEVEDLKESAIDRRRTKSSTKRVLLSKDVMERYAEIAFSKKERWEEIDSQKIYKVKRFLDYRSNMLIYFQFINDFLTKGIPDELDKNGEIKQLELWKLIDDDETISDKNLNQVSKNLYTYISQEIKDSQTRAENNREKNKEKEHFKEFYAFNDISEESIREDVKKFIYLYANLRHNLMHYNYSFFENLFEGKDLVIEKTKSLLSSTLDLNIFKELSNIVELREENKTNYLDDETTIRVLGKEKKAKTLHKIYSILCSRKNGFNKFINSFFSTDGIEEEFLKSEIKKDFLERLNWVEKSLIEKINNPPSDTKLKYKNDKTIENMTKEKEEKLELISLLNPQVSDYKTENFTPYYWDIHQSPSYKKLYNDRKVLVSELSKLIAIGINSDTKKRITDLNAELLKIKIKMEKITKLNSKIRLQYKLQMAFGFIYANYSKVYKEKRVLNINGFVQNFDPTKLNKEKELESRLIYLKAPYNIFEDNKSLDFNMKIVENIPVSEKSIFRIKPENNLSKFYILSYLLLPVELRGDFLGYVKHHYYGIKNVDFEEIPDIKEDKPNENSDSFFHNLRLFEKNSKKFELIKYRLVEFGNLKDHLPRIYEKFGIKPDVLEYIENSGNKDSKLFDRNILLPIMKYYQHIFKLLNDIEVHALLRFSEKDSISLDESIKECSKGKFLNFGKLLFLSRYGLEAKKDNKFKDIFNRENGLSITKDDAKTERKKYFEIFETRNKIAHLNYKQLFHDLLFDSNININKELEGIIQETKTIGLNAQTLGYNFLNDFYMRKEMFISNQKKSSMTLINNPLSKDKDTKEIGLLKLYGLSKSQPKDLILAKYKELMNLIEKTEDSILKKKDFLPVKEVSITVKKSTPNKKGIMVELPEILQIKDLNEMDLLAYASNIRGKLHKDSSDLFGIYKKLTIKELKKKLINLFIKGEKRYLNLELVNKTGYMAIYESTGLYPKSYEILNHEISFSEISMKNWYEHDFKPIFQIDGSLPNNTDYKNGVFIYTSPYEFRDKELMKKQRTVHKRDIEKTFYNENDMDYTGIYNQKIKALY

SEQ ID NO: 57 - protein, 1069 aa, synthetic construct
MFNDSQGNQIEQNDKSFLEIFLNQARLNAHITLCHISDLLGENTVDEDSLAIMPVLRFLESDKDAVKSERTFELVEKHFPMLKVIYGSGPKKEEVTFLGRTKKYKEILGCFLKAVNGKRNEYCHAYSKSSGDYDIKTLTRHLENCFDASVRKIKEIRSLEEEEVFHLRRKTSEGKGKEKRVVDNPNFHYHFKNEEGQLSEKGLAFLVAMFLEKKDAYLFLKRQHGFHRGESPGEKATLESFCVFRIRLPKPVMTSDVDKNGLALDMLNDLKKCPKELFELLAEEKQQEFRVTDSEDGDEDGNEILMRRYSDRFPYFALRYCDENEVFKNIRFHIDLGRYYFKFYEKDTIDGNKYQRALDKRLKTFGRIKDVKNKVRQEWGDIIKAPDEISDEQNEPYKTNSTPHYNLVDNQIGFTISGDCKLPDVKQPEGKILLQKPDAWLSIYELPGMLFHGLGYGFKKTESLIEQYIIRQRKICEEIFRTGTIPANAGEFLPNAIKEIGTGNETSNEYAKNKLDRKLSDTRQRIRAIKATKNRIADKSNKPGKRKFFDIRAGKLADFLARDIMALQEFDPAKEGKDKLTSINFQVLQATLAFYGAKKNTLAGMFKRIGLLEGDNPHPFMKEIEPGKHNSIVGFYEAYLDRKEAYLEECRKGENLDNYQFLRPSRQRYAKGKRDLKTITRQLLDNPVNIPNGFFREEIREFVCEQDAGLKSRKMNTAYMVGANFEKTYGGQQPFQYYQRNYPVVLKAQEYCKKRENRGIAEVLRSIAGEMSYREMEAFIKKEIPDNGRFEPENLKRNLLNGCKDFKKNERLLRRYKVQDMVAFAMVEKTLKEQLSFDGNVVKLEAITPTEESLFKKPILCSTDIAITFNTKPTHYDNGYVGFIQEKYAGHYASEGNKIILKYRIISENTKLKDIGKYRRYLYDRRLPGLLIWKYAPNAQSDIEIKYSEIEEEIKAYEQYRLRIAEQLYVLETKVIDCYICKDEPGEDYISFNGIIDTIKAEQAGSEEKCDTLLSIRNAVYHNQFPAFMDAIEKTEGDNIAGKMLSITEDYVKCTVEQMNEGDKEFVNV

SEQ ID NO: 58 - protein, 788 aa, synthetic construct
MNSVELKKEEAAFYFNQAELNLKAIEDDIFDKGRRRTLLDNPRILAEVENFIFNFKDVTKNAKGEIDCLISKLRELRNFYSHYVHNDNVKVLSKGEKPILEKDYQFAIERTASEDVKLEIVDKRDKLTDAGVLFLLCMFLKKSQANKLISGISGFKRNDPTGQPRRNLFTYFSVREGYKVVPDMQKHYLLFTLVNHLSNQDDYVENVQQPYDISEGLFFHRIASTFLNISGILRNMKFYSYQSSRLKEQRGETKSDKGYFEWIEPFQGNSYFSVDGQKGVIGEDELKELCYVLLVGKQDVNKVEGRITQFLKKFKNADSVEKVEDDEMLDRENFPASYFAKTRVGSIKGKILNRLKKAIESKKITGVDVKAYNKMKEVMAFINNSLPVDEKLKPKDYKRYLGMVRFWGREKINIEREFRSKGWSKYFTSGFWMAKNLEEAYKLARQKNAELFNKLKTAVEKMNEQEFEKYQQINDAKDLASLKRLAQDFGMKWEEKDWQEYSGQIKKRITDRQKLTIMKQRVTAGLKKKHGIENLNLRITIDSNKSRRVVLNRIAIPRGFIKKHILGWQGSEKVSKKIREAKCKILLSGKYEELSRQFFKAKDYDKMTQINSLYEKNKLIALMAVYLMEQLNIQLKEYTELGTLKKTTVDFKISNKVTEKIPFSQYPSLVYAMSREYADNVHDYKFSEKDKPFLGKIDAIEKERMEFIKQVLEFEKYLFDNSIIDRKKFADTATHISFKEIVNELVNKGRDGNELTKLKDARDTALHGGILTGTSFEETKSLINEMKK

SEQ ID NO: 59 - protein, 1068 aa, synthetic construct
MCNEIQTNQTGQKDNSLFGIYLNQARLNAYIALCYISELLGEKTVDEDSLSEMPVLRFLDSDKDIVKSKRTFELLEKRFPMLKVIYDGEPKKEQDDKFLERTKKYKEILTCLIKALNDKRNEFCHANTKGGGGEYDIKQLIRYLNNCFDASVRRVKDVRGLEEEDVFHLRRKTSQGKGREKRVIDNPNFYYHFQDKEGKISEKGLAFLASVFLEKKDAHELLKKQRGFKKDDTPGYKATLESFYCFRIKLPKPVMKSDEDKNGLALDMLNELKKCPKEIFDLLPKEQQEEFRVIDTSDDNEDDNEILMRRYSDRFPYLALRYCDENELFENLRFQIDLGRYYFKFYEKQTIDGNTQQRSLDKKLKTFGRIKEVKDKVQQQWQDVIKSPDEIEDEQKEPYKANTTPHYNLVDNQIGFVMSRDCNLPDLNQPDGKLKLQKPDAWLSIYELPGMIFHGLTSDFKQTEILINKYIGRQRSICKKIFGTGSIPQDAGEYLPEALKDIEENDTKRTSYAKKKLCRILEDTEQRIKAIKKTEQRLVDKSNKPGKKQFFDIRAGKLADFLARDIMILQSFDPAKDGKDKLTSINYQVLQATLAYYGAKKDSIADMFKTIGLLDGDNPHPFLKEINPSKYNSIVEFYKAYLNRKKGYLEKCEKEGKFDEQFLRPSRQRYAKGKRDLKTIAKQLLDNPVNIPKGFFQKQIKEFVCVREPSLEELQMNTAYMIQAYFEKEYGTQQPFCSYQKTYPVVSKSTEYCKKAKNKEIKEVLRKITAEMSYRELRKFIDSKIPDGRYEPENLKKNLLDGCRDFKNNERLLRRFKVQDMVMFMMVEKTLKDQLAFEGNVIKLKDITPVEDSPFNKPVFCSSDVSASFNTNKKYESGYVDFIKKNYKGLYISQGGRIILKYRVTSESTKLKDIGKYRRYLYDRRLPGLLIWKYPPNIEGGIEIKYADIEEEIKAYEKYRKQIVQQIYMLEKKAVDHFKLEIEPEENHIPFNTVTDTIKFRLAGSEEKCDTLLNIRNSINHNQFPVFDEKIENAQGQSISERMFSITENYVKYITEHITESDKDFAYV

SEQ ID NO: 60 - protein, 1112 aa, synthetic construct
MLCPRAIFSTLFNFVHMEAKHTIQYFDFTNIKHKHFFAGLLNTAQHNFDLSLRELAKRIHNKDTTKGLITIAFNNSVSESDFKARTNYLSESLAFIKLMNYENRAEFRDTLLVLYNTIDGLRNYYTHYKRDKITIDESVYKLLDYLLLTSAKEVKINRAKSEEYKKYLSIKYQDEFEEIIDESNKKIEEDNALLKKGERKTGLIKPQDEVNHVLNKVFRSFLYKNDKGEDELRDNASSKNKEDTDLSTYGFVQLLALFLNKKQTESLLSYTKYLKDTRKLKFVTSRWTLTFLCYKDIKRLFKSDYSNDSLLLQMISELTKCPNEIYRQLTPDKKQEFIEDINEYYKDTISFEGTNEQALVSHEVIQKRYANRFSYFTIRFLDEIIDFPTLKFHVNLGKFNHDTTKKKFSNAIETERSILEKITVFTKLSTATNNKKDYFSKPENKELENDWLEFPMPSYQFNKNNIGIWLSIDKKSGESDAPEERENSKLSKYKIAEKLLLKNTIRKPIAFLSFNELPALLYSLLIEKKTPIEIEKIIQSKIIEQRKLISSFDKTKIISNKRLPKKLIRASHLDSTTDVKKLEKDIKTEISKDPIGDIRKHYKKEIKNVNEFTNSEKGKVTTWLADDIKRFTSKETRENWKGYQYAEFQALLSFYDINKDKPKSFLEKDLNYDYKKDNSFNGLNFNLKTLFDFYNSYLKNRREYLNNLLKEIESSKDEIHEKVFIGFTKRLYEIKPIDIQKNVFLKKIPLNLPRGIFDDKPTSYDKGGKDNTEIASWFTLSSKAENAQLYYCFPKVYSYPTTKLKWDNRKRRKIQKSSIATQLISPKERLKQQYLKDLPKTVQVEIYKNEKSIRKIMREDFFILEMVKHLLKKSSIKGLDKLQLKDVFLTKEEKNRRIVESLKQSQRVKGDKMENVVNDSYILSQQVAISILNDKIIDTVQIKTIGKLRRLEEDKRVRQLIEYFPDKPSWTVLEIQSEIDDYDRVRKFEFFSSVHVLEKLIYKDAKKNNAKEGLLQNNNHNFRKYLSYYYLNEDRDAFNSLPNFDTITIDNPSIKSEWYRLYLLVKIRNKFSHNQLLSKVDFDSLKEIISMNSGEKIAAFLNRAFDKLIIVK

SEQ ID NO: 61 - protein, 1130 aa, synthetic construct
MNNNATIQKQSVIYAFDKSEDKHFFAGLLNMAELNLVIALQETLIRTIRNTKTSNNAKVLIQQLFTEDIMQSDWNYRVEVLSEFLPVTKALQPQADKATFIKTLTLFAETLNTLRNFYTHHYHPPVEIDSRLFEILDAVLLHSAVYVKKQRLKTEDGKTMFPKQYEDDLRTKLAIHNEGVKQKRISEREKPENKKIPKNKFNEIFNKKNKTYSEADFVNTYLNGVFHHLLYKDRKKEGLDQLKKDAASKKKDENYFSKNGFVLFLSFFLDKKNLEDLFSHTEHFRGTHELRFMVTRWVFSLHAFRDVRRVLRSDYSNDALLLQMIGELNKCPKELFNILSTEHQLEFFEDLNEYYSNNEGGDESQPDSLVTHTVWRKRYDDKFSYFALRFLDEFAGFTNLKFQVVVGNYVHDSRTKELAGINKVTYRTIKEKIKVFGKLSEIDRLKKEYFLKKNQEQQVSDPTTETTELSEGWEEYPVAHYKLDNNNIPIYLSIPGFQKDSTPKEYRTKRLNKKSILEQLTTTGFIESEPIAFLSVNELPALLYQLLFNNKSAAQIETMLIQKITSQVSEIKRFNTESTIDKHKIPKRLIQLASTIATSTSINFVKLLKDINSEIDTCNSRLKETDDNLNKSKYRRFNNKQRGKVATWLADDIKRFAGKDIRSNNWKSHLHGELQALLAFYTERKADIQLLLEKELGLPLDSKSLLSTSFSENTLEGFYVKYLKTRREILTDFKASVDKTKNEYPNSLDTSTIEPLFDIFDKRLYVSSHIEKYKSDLLQKPLNLPRGIFDTATYFPLQKGDKSNFQPWFEVAAKTEHYQEFYNFPRKYETIELNPVSGKGLLEQNNNKPVDPDVFKNEKRLREIARQDFYVLEMAKYMIKHMYPAIRTSQNYTLKDVFKTKQEKEQIKLRAAQQSQKKAGSGGEHFTDDSHLLLRRFPVTVAIGNKKIVDYVALKDIGKFRRLEKDNRIKLLLSYSEQEIWTVKEIEDEITNYEHIRKQSFFKEVHVFEQEVLQKVKLKAGIDTHPEILEQNGYPNFKHYVAYHFFNNDTITFDKFVKVDFQNEKSRKEIVESKNMLLLKAYFLVLIRNKFSHNQLPEKVDFLKMNAYIKFSGEKIGDYLLHFFKESIVY

SEQ ID NO: 62 - protein, 949 aa, synthetic construct
MSAMTKGLRNCKGCVNMKKKMSLREKREAEKQAKKAAYSAASKNTDSKPAEKKAETPKPAEIISDNSRNKTAVKAAGLKSTIISGDKLYMTSFGKGNAAVIEQKIDINDYSFSAMKDTPSLEVDKAESKEISFSSHHPFVKNDKLTTYNPLYGGKDNPEKPVGRDMLGLKDKLEERYFGCTFNDNLHIQIIYNILDIEKILAVHSANITTALDHMVDEDDEKYLNSDYIGYMNTINTYDVFMDPSKNSSLSPKDRKNIDNSRAKFEKLLSTKRLGYFGFDYDANGKDKKKNEEIKKRLYHLTAFAGQLRQWSFHSAGNYPRTWLYKLDSLDKEYLDTLDHYFDKRFNDINDDFVTKNATNLYILKEVFPEANFKDIADLYYDFIVIKSHKNMGFSIKKLREKMLECDGADRIKEQDMDSVRSKLYKLIDFCIFKYYHEFPELSEKNVDILRAAVSDTKKDNLYSDEAARLWSIFKEKFLGFCDKIVVWVTGEHEKDITSVIDKDAYRNRSNVSYFSKLMYAMCFFLDGKEINDLLTTLINKFDNIANQIKTAKELGINTAFVKNYDFFNHSEKYVDELNIVKNIARMKKPSSNAKKAMYHDALTILGIPEDMDEKALDEELDLILEKKTDPVTGKPLKGKNPLRNFIANNVIENSRFIYLIKFCNPENVRKIVNNTKVTEFVLKRIPDAQIERYYKSCTDSEMNPPTEKKITELAGKLKDMNFGNFRNVRQSAKENMEKERFKAVIGLYLTVVYRVVKNLVDVNSRYIMAFHSLERDSQLYNVSVDNDYLALTDTLVKEGDNSRSRYLAGNKRLRDCVKQDIDNAKKWFVSDKYNSITKYRNNVAHLTAVRNCAEFIGDITKIDSYFALYHYLIQRQLAKGLDHERSGFDRNYPQYAPLFKWHTYVKDVVKALNAPFGYNIPRFKNLSIDALFDRNEIKKNDGEKKSDD

SEQ ID NO: 63 - protein, 953 aa, synthetic construct
MSNEIGAFREHQFAYAPGNEKQEEATFATYFNLALSNVEGMMFGEVESNPDKIEKSLDTLPPAILRQIASFIWLSKEDHPDKAYSTEEVKVIVTDLVRRLCFYRNYFSHCFYLDTQYFYSDELVDTTAIGEKLPYNFHHFITNRLFRYSLPEITLFRWNEGERKYEILRDGLIFFCCLFLKRGQAERFLNELRFFKRTDEEGRIKRTIFTKYCTRESHKHIGIEEQDFLIFQDIIGDLNRVPKVCDGVVDLSKENERYIKNRETSNESDENKARYRLLIREKDKFPYYLMRYIVDFGVLPCITFKQNDYSTKEGRGQFHYQDAAVAQEERCYNFVVRNGNVYYSYMPQAQNVVRISELQGTISVEELRNMVYASINGKDVNKSVEQYLYHLHLLYEKILTISGQTIKEGRVDVEDYRPLLDKLLLRPASNGEELRRELRKLLPKRVCDLLSNRFDCSEGVSAVEKRLKAILLRHEQLLLSQNPALHIDKIKSVIDYLYLFFSDDEKFRQQPTEKAHRGLKDEEFQMYHYLVGDYDSHPLALWKELEASGRLKPEMRKLTSATSLHGLYMLCLKGTVEWCRKQLMSIGKGTAKVEAIADRVGLKLYDKLKEYTPEQLEREVKLVVMHGYAAAATPKPKAQAAIPSKLTELRFYSFLGKREMSFAAFIRQDKKAQKLWLRNFYTVENIKTLQKRQAAADAACKKLYNLVGEVERVHTNDKVLVLVAQRYRERLLNVGSKCAVTLDNPERQQKLADVYEVQNAWLSIRFDDLDFTLTHVNLSNLRKAYNLIPRKHILAFKEYLDNRVKQKLCEECRNVRRKEDLCTCCSPRYSNLTSWLKENHSESSIEREAATMMLLDVERKLLSFLLDERRKAIIEYGKFIPFSALVKECRLADAGLCGIRNDVLHDNVISYADAIGKLSAYFPKEASEAVEYIRRTKEVREQRREELMANSSQ

SEQ ID NO: 64 - protein, 1145 aa, synthetic construct
MKVVKPCGNSVVLAGGEIRRTIQPSITSITSVNAKQTHRPAIDFLLNNEKFFLAQWASMLDKIISKPHQANQASPNYATYEARENLSKAFYVLWKDKKLLNNFSHKDNQRKSFNQQWGLKVHPYKKPNKPTANNKPEAIKKAGEISKGRWYDSLVTKSKPNKNTAKHHKSATIHYKNTAKIIYEHLYVKQRSISKRSAYPQGYIANRANSIEKSVHSFTLKDNKLATLCINDQHRINRLTKQSISIAQPSKYRLDGLIKDLKIKTKQYYQNKVSAAELRAKKTKRPVKPPLENQQLPLKEAMICLYEHYARIFGTVTKIETIIIKEPELWQYHCLIKSTLKQRYPKQAVLNKIYPVITEDQLHKLAQNIETNKTLAMAIRLGKVVHYSQDNLGYEDIEHSDIVNSDYWGSAGQTLIKQKESFAQHWLIALSVANGSLRGLLDTQDNADIYLSRGINTALEGIPTDFEARFKLLFGNHHQLYQDDLQRDELLRQLYGTLSQLRHASFHFKSEQSFNQVLLKKVTLDTTLDNNTSVSQTLAKNINNYIDEHLAQQQALVKKTLEASFVTKYLNQTQCDQLLSSLQNNQAIATLLPKFNKLLHRAATTEQSIIAVANQVELQNNPNQQCAFICLKQLYEQDFWRWLLKQKSSTLNHHIDQAKIRANKQANKLNAKNTLEHQKIMARMQQLRGINAQESLLAYFSYLSAQTASFFQIQTNTYQHNAQAASEHSNFIEQLKQDFLIRAFKQYLKAEKFNYLLHLGTPASCVIDIDKITKKTPVNNPLLYLSLHLIPIEFVNQLSLQIKKYTVLTGSEKFGNIHNDINLYLTMHNAILDIKWLDNRDELAKFYDNKALFEQVFSQDNKHLIPVKGLREMLRFGNLSELGVIFERSIVEANEINSLQDKQKNIAAIQAKKAKAHQKLSQQKDINKQDKADYKSDVDKVSEYNHLKNQVYLHNHKQTHQLIMTISGRLVGFSRRYERDIYFVLLALLTLNKVKTDELSQNFLASIRSGQIIKASNQLGEQYANIKSKLNLLFQIEKHREIRNRFAHFDDLRKAESLNITQQINEARQLMSYDRKSKNSVVKSILNIVKKDNISIDFTMDNQHNLTLKSIKADSIIHLKDKDISEKPQGKKYKNAVKKLFENTV

SEQ ID NO: 65 - protein, 1160 aa, synthetic construct
MNVIESFLPLNTKEKIDQLMAIIKSEPKAMNQNAWHMIFGNIGKSKMQMYFIEKYPQSLFAAPGNYIPSCNGQGQEEKNPQQPQVQQHERQTDIPVPPTSLKDNRFLYATYIEMAFHNMFLNIKHIYGVVFGRDIMAEAKANYEALNPEKKWDEDFANEFLVWKPMFEAFNNGNVEEKQKVGEMLSRHFPLLVPFTDFTNHESNYKNLTIVGILRRLSQVLRVLRNLYSHYRIELFENQKKVYLDNEYLIIRCTMNAYMGARRVIKDRFSYDEKDMRCTDQYQFVDERGRRLKEKVEIKGFRYKIGEKGKDSKLHFTPFGLVAFISLFLEKKYSKILTDKLRLIPIQDQHIINEMLAVYRIRLNAQKLNISKDADLLALDIINELQRCPKDLFSLLSPSDQKKFRHESEANDEVLMVRHSDRFPFLVMKYIDDCQLFDNIRFQVSLGKYFYKFYDKNCIDSETRVRALSKNLNGFGRLSKIEAMREGCWEDSIRQYDDIHKNTVDEKPYVTDHHAKYVINGNRIAMRIIREEEKAYLPELNAEGVRNLAPTCWLSIYDLSSLAFLLYLTNGDFVEGIIENTVENYHKLFKDIENGTMLPVANEEELDSLLCRNYGGIKQKDIPKNMLDYLLRKTSDARKRFVEFSKSIIDRMISQTEYKIEQIKRQEEQCRQNKIGKKSYVIIKDGKLASFLANDIMLFQPNDSENSNKLTGLNFRILQSTLATMKECGIDQLKRTLTSAHIIGEANDEYCNPIVMKMMRKRVPENTRDFYKSYLKARLEYLNECKRKADYENLSFLHSNRSKWQEHDDEFCRLLAGRYLHDENGGTEFEKSINLPSGMFDKYIREKLCEVPALKDIANDETKNVSYLIYAYFKNVCNDDCLFFYEAGRSYRLFKLLGMNGSKTAQDIRLMLNRKHKTSLYKEIDKYLISIPLAEREQEKARLMGLLKGMKNSETDFKRFKIQDILLFLIAKKLFKDNVQDDVQHTAFESLKLKSLKDTDGLSQKIRISVKIKSKNGYEKEIKKPELKLKNYADFYKLLNDRRLPALLDLVREHSIDYDSLVDEFGGYDKVRPNVMKDVLKYERKYYDNHADSDESLDFGSMLDNSSFNEEEKDLLRKIRNSFAHNTYPKYYIVNKAGDPHLPEKAIKCSEKFSSDINNE

SEQ ID NO: 66 - protein, 1285 aa, synthetic construct
MAFDKPRPKRRQARSDFYITDKAIMGGYFNLAQLNFFKTLMEIFTKAGIDVSKIKQDNSPKYLMILIKKLTHDDEKIDDKKWADALDLSNECLLKLQQLLYKHFPFLGPVMGGEASYNIYKLKDGHPEVKVANDVMRGVKLEDCLAVVRHFALCLNDCRNFYTHFNPYNPIEAQKEQYLSQNKVAVWLDKVKDASRRIIKQNNQLTSQDMEFLTGIDRMKPQDKVDDFGNIMTDRRGRPIKEYVEYEDYYFRIRGKRYLVDAAGAKLVDQEPRNALSDFGVVFLCTLFLESDQARRMLDELRLFETGPYDGSRDGDEFKNDILREILLFYRTRVPRGKRLDPMDDTTLLAMDMLNELRKCPMPLYDVLSREGQGFFEDEVKRPNDLTPEVAKRLRSSDRFPYLALRYIDLNKCFDNIRFQVQLGKFRYKFYDKTTIDGEQVVRGLQKEVNAYGRLQDVEHYRQEKYADMLQQTELVETGEEDITIANFIPDTPQSSSYLSDRTASYNIHNNRIGLFWNMPGEQEVLAGDEKMYLPDLNVDDNGKADVFLPAPKASLSVRDLPALVFYLYLQNQHPDLTPAEAIIQQKYNALVSFFEDVSTGRLLPVKDIAELEAAIDKYGHLTVHEIPEKLRDYLTGVAGTEDDDDCADRLDCYAMGILEKRYRRVAAHIDQLKEARKMVGDKMNRYGKKSYIDVRPRRLAEQLAQSIVDWQPATDNGRHKMTGKNFQRLIAFLARYTDEVPVQEIKDLMTRARLLDGPVAHPFLQQVLDKNPLNIEVLYDLYFKEEKLHLENYLEIETNKQGEEVFRKKASVDLSRIPFLNSGRLRFHKRDSASFQRLAARYMQVDGRQSTILLPDGLFTPHILSVLKSEYRDLQDHLQDQELNRNASYLMSVYLECVLHDSAQPFYLSNSNDSPFARRYDLFAILQNKKKGAELLPNPLAPVEINRRLTAKTPDGSAKLIERDIKALLDDMARKTEERIHDLQQEYSRKKEKQAQEERVKLERCFMRKIADVKKQAQEERINLQRRLKHKITDVKKNERTIRRYKTQDMAVFLMAKQMLANQLSWQNQEGEVPFKLANVCNEGFLRQTMKVSFPYEVPLKEDKTKKVTIDIVQDNMSLKNYGLLYKLYHDERVVTLLQNIVDQQQISFAELTAELSLYDQNRSKAFSNFQQFEKLAFETNKEALTHPEHRGFFLEKVNKKNQVIRYERRNNFDALLDLLDAIEAHQLDPRERQWLTSVRNAFCHNSYYKIDMQQIEKKLPTIIQQIVEIVQRITDKASHPSNR

SEQ ID NO: 67 - protein, 1331 aa, synthetic construct
MSTSDSFYSFGVDYTKTYDQQPDCRRHVFGAYANLARHNMTLVVNTIMQAIGMPTFNENIISDAFNSTHRKEIDKLDNIKKVLLQERLYRHFAFLKRMKLEDSKKKTVQLNTLLETLSDFTRMMAYMRNFYTHYNPYNSRDEKEKQGDLNKKMGERLQFLLENSLQMLKDTEKLDHAKNEVLSSLRVPERKTIRPGDTEYSNIHDLYFTKNKRKGIKYDKDTKVFTQQVYILNPAYPAKMTDSDGYLSLAGMVHFLCLFLEKKIAFELMDEVGFTQQCHFNGRDAEQQLLYIKEVMCMNRVRMAQPRLDSEMSDTALALDMINELRKCPEPLFKVLDKEARNEFKDDATVQWEMEHNVEARPGEDEENNNNEDDIEEPDETIREDKAVPRSTFVRWNDRFPQMTLSYIDMQSVLPTIRFQLYLGKYRFAFYEHDKEYSVDNAERLRVLQKEMHGFGRPQEVKANLKDKWKDYFEHKTIENGLTMKEPDKAGQAPYVTEQNPQYAIDEKSHSIGIRWGEWSSGHGGSHYGDLDKLNMFIPCLPKPKADEDKDKQRNHAEKLLPPKCMLSLYELSGLVFYHYLLKKCGKETGQVERHIITYHDNLVRFLTDVKEGTIIPVTDVDDPKGYLEKMLMESYALRLSDIPERIKKYLLNETKSREYRLKESAKKRLEIRLKKVMKDLESHQAKKKRIGTKENKFNRKRSTIKTGKLAKDLIRDIMDWMPRGSVGRMNLSGESYMAIQAALTMLGQQFDRGKANVEIYDLVDILVKAKLIMPDSDVEGADFNPSHYHPFMDDVLTEDRCGPETSLEDVYEWYLEEEIAHIKRLISSINKVSTDSLLMKQYNLIPFLHCGRERWNKVDDEAIKKLAEKYLNNPIQLPNSLFAKPIFELLKEVAQEKNYDRLSQALEAASQDANNLSKNTAYLIGLYFEMVEGDHSQAFYNSCPADDGTVSPYRHVYRVFKKLYGEIIENTNRTTSPAYSKKEISDILAGREVNGKILSDRISRYVQKAVDEFKKQKDDDLKQYRIEIKDAAFNENRVKHLRKKAYEIFEEVDVKVDQKREEFERLTDQYRQEVEAKLKKLLKKVQLNERAILRFKTQDILLLMMSRDILKMGSDNEFKLENVLSESLLEKRVDFSWKVSVNDQTKDNVTTYKTIEQKNMKMKDYGQFYKFASDHQRLESLLSRLSPSVFQRAEIENEFSYYDSNRSEVFRLVYILESFALEMKPGLKDDNNAKEPWFNYIRKGKPSPKRNSFIELLEVLIAGADGILDNQEKELLREIRNAFGHNTYDVDFETIFSGPRKSKRKVPEVANGIKDNMEEKTTNVLEKTKK

SEQ ID NO: 68 - protein, 910 aa, synthetic construct
MKQNDREKNSKIKKSAAKAVGVKSLARLSDGSTVVSSFGKGAAAELESLITGGEIRKLSDKAILEITDDTQNKNVYNVKSSRIPNLTARTDKLSDKSGMDDLGFKRELELEVFGQSFDDSIHIQIAHAVFDIQKSLAAVIPNVLYTLNNLDRSYSTDDTNGKKDIIGNTLNYQHSYDNFDKEKLGEFKEYYNAAKDRFSYFPDILCVLEKVNGKDRYQPKSEEDAFNVLSSVNMLRNSLFHFAQKSNDGKARIAVFKNQFDSGFSHITSTVNKIYSAKIAGVNENFLNNEGNNLYIILNATNWDIKKIVPQLYRFSVLKSDKNMGFNMRKLREFAVESKSIDLSRLNDKFLTNNRKKLYKVIDFIIYYHLNKVLKDSFADGFVAALRASQSEEEKEKLYAQYSERLFADEGLKSAVKKAVDMMSDTKFSIFKKKAPLDKALIENIKVNSDASDFCKLIYVFTRFLDGKEINILLNSLIKKFQDIHSFNTTVKKLSENNLIINADYVDDYSLFEQSGTVARELMLIKSISKMDFGLDNINLSFMYDDALRTLGVSDENLPEVKREYFGKTKNLSAYIRNNVLENRRFKYVIKYIHPSDVQKIACNKAIAGFVLNRMPDTQIKRYYDSLINKGATDMQAQAKALLDCITGISFDAIKDDKHLHKSKEKSPQRSADRERKKAMLTLYYTIVYIFVKQMLHINSLYTIGFFYLERDQRFIYSRAKKENKNPSKNSYLNDFRSVTAYFIPSEIMERIEKNENKGFLKEFEEAWKTCGETSRLRKEDVLLYARYISPDHALKNYKTILNSYRNKIAHINVIMSAGKYTGSIKRMDSYFAVFQHLVQCDILSNPNNANCFKSESLKPLLLDMRFDGTDEKLYSKRLTRALNIPFGYNVPRYKNLTFEKIYLKSSINE

SEQ ID NO: 69 - protein, 1270 aa, synthetic construct
MGKKKHDKQEPIANRHILGTYFNMAFENFNRTMYILCEKKLKISTSEYGTPDTEHLIADQPIQLRKALFRYLPFLAPIMDDWVGYQLRSKKSKGNGGDENITQKQKTAKLDSSIEDIVSQLNIFAQELRYCRNKYTHKNAYTLAWEDEEHLQREKQIAKMLEVLMKAERELLKNRKDREKKSSAMELFLKDGDQYYYRTNKGKTVRNKQFYFNPASFELTKKGQVDYDTIALTDFGRFYFCSLFLRSRDAERFATEMKIFIESPWPDIKDKDSNPTTYTPSPENKIMREVMQMHRIHVPREKRIDAVPSKGTLLMDILEELRRCPKILFDTFCPTTKSSFNHIVIQDDGTKTSTLMVRHQDRFAQLALRYIDQNGLFPNIRFQLRLGLFRFRFYDKTLIDGTPCIRTVHKELNGYGRLQVVEEKRVTKWGDRFQKVTTKENEGYEIEQLQPDTPQTDPYVTDWRSTYNIHTGRIGMSWGEVNVGGKTEAGSALLPKVDRKSNGDDCYYIPDLPTLKSDDGKNKDRKVNIPQDAPLCTMSTYDLPALLFYQYLIDSYGRKGADEKKLPTSENIILEKCYALKALFKAAEDNTCTPKSLREKERELGLSDNEIPKKLLSYLDGEKHNPQQNRKKHVEHVLNGIINDINGRLESFENKEKRIKAGGRNNRYGNPHHADVRHGSLARYLMRSMLRWQSVDVESPHFGKLTSLNARTLMGALAAFGSGDERLPLNEILTAANMIGGNNPHPFIEEAINGADNIEKLYVAYLKNEKKHAEKILRNIDEHLQSLPPFLRASDEQNHWGVDLEQQAYINKYAAKLSELPIQLPDGLFTKYIVELLHNATKKYSELKIMDSIVDSDKRTTDKGGHKIGDNPSSSASHIIACYFEKVLGDKSQKFYDSQTKDYKRFYENISKLNPRRERNKALIPDYFTAKEIQEKIKEARKSVKGKNDDDATTLRDKLNQVEEKERAIRLFRVEDMVLFLSAKQMLMSVVGRSLTEDVNQTNALHESKDNLSQLRIKAKELKLGQFGFDEDFRFLSEGDNEEERKEKDQTESLLEYIYPYKIRKEGKLVGTINIKQKGLSLKNYGNIYSILGDDRLKSLMEGLFEIGVSEVTFGDITSEFANFDQLRSTILKLLQDNIEEIAFNRNISVLNNPRNRNFYSVKDKDGNQLKIKITDPVTNEIIALSKDAIRNQFPELIKMLEEYEADRVSINELRKAVAHNHYPKDISKLKPTKNKKLQLPNIAHLANENAKKIIDAAQKASAEKEKKSE

SEQ ID NO: 70 - protein, 1290 aa, synthetic construct
MANTQFKLKSVDYSKPYDEQPECKRHVVGAYANLARHNMTLTVNTIMQAIGMEIFDENNIGDAFNSSHRKKIDALDNIQKVNLQKRLYRHFPFFKRMKLEDEDKKSVQLTTLLEVMSDFTSCMAIIRNFYTHYHPYNSPDEKKRQLELKKRMGKRLQFLYENTSQMFKTTEALDHESNEVLSALRIPEDYIEEILPGDKEYDNLFNLINDPRTSKFKKQGLKLNQQTKVITRKKVRFVRNPDYQAYMMDETNGMSDVATIFFLCLFLDKKVSFDMMDEVGFTKQIKFNGPQADRQLLYLKEIMCMNRIRMTKAKLDSEMTDTALALDMLGEVRKCPKALYEVLDKDARNEFKDDATVQWETEHGKEAVSTEALASESDEDELTDKNTPRSTFVRWDDRFPQMALRYIDYQGLFNDIRFQLNLGKYRFAFYQHDNKQSVDNEERLRILQKELHGFGRIQEVEEKKNEKWKELYDEKTVKDGLTQKKTDEAGQAPYITEQYAQYAIDEKSHSIGLRWEGWNKKDKSKGHYGDLDKLKMFIPYVPSKPKEEERQTNQAEDLMAPQAMLNLYELPAILFYQYLLDKYKSDTSNAENIIKTAYSNLVSFFNDVDQGLLAPAEDADENERISKISSLLEGYHLQMSDIPEKLRNYLCNKGIDYDLKMEKSAIGRLEEKKKHVEKALSSYKDKKKIIGSKDNKFDKMRASIKTGQLATWLIRDIMDWVPNKSSARNRLTGQNYTALQAAMALFGQQANSNRSYLESCFRNAHLLPLDGKPFNKNTHHPFLEDVLQAMEDETLESFYEKYLEFETKHIAKVIKTLKNGTDFDDYYQVPFLHCDRQRWAGPDKNQAAQYLKRPLQLPNGIFTQPIFDLLWKIDNLELHKALEESQQANGDNPPLTDNVAYLMRLYFEFVEHDHAQPFYYTTTTDGNKSHYLHIYRIFKKLYGQPIPHSNKTTVPAYTIDEIRHLRKQAIADIEEYVDNEIEKWRRTKQDRFESKLRKKLKKENDKRYKKHEKQLNINEEIQKAVKKETDTMRTDMTSKMKRQLRNVYDNERTIRRFKAQDMMLLIMARNILKAKSNDKDFTDGFCLENVFSDSLLDKPIDFEWKVNIKGASKTIKQEGMKMKNYGQFYKFASDHQRLESLLSRLPDSLFLRAEIENELAYYDSNRSKVFRQVYIIESEAYRLKPGLQDDANASKDWFYFTDKKTHKQRPIRNSFIQLLEILAAGEDGILDNDEKVALQKTRNAFGHNTYDVDLNVVFKGKEDKKKIPEVANGIKEKIETQTEELKRRSK

SEQ ID NO: 71 - protein, 1117 aa, synthetic construct
MTDNTNKYFKLKEVDHTQTYETQTDCQRHVVGVYANIARHNMTLAVNTVMQSLGEPLFEENSIADAFNDTHRKDIRDFENIKKLELQERLYRHFPFLKRMYKDKEVSLKDLMETMSCFTQSMAMVRNTYTHYRPFESNVEEQNDLKTKLGQYMEDLFLESRKVFKKEERLDASSNEVLGRVYKSIKNDKGEKYVLDFNYPAYMKQGKEGLSDVGLLYFLCLFLDKKAAFDLLNRTGFTQHAKNYFDGNEEQTLLLLEMMCMNRIRMVHSRIDSEMSNEALALDMLNELRKCPRPLYEQLGKDDRDSFKDVMSTQWENESPDNEDAPIDAEGKSIPKTTMVRWDDRFATMALSYIDTMQWMDDIRFQLKLGKYRFAFYNHDGDHIAGNLLRVLQKEMHGFGRIREVEKEMNEKWGALFEQKYEENGLERKDADQADQAPYITRQRPQYAIDDESHSIGMRWDFTRPKYWDFTKPSYGDLANKKMFIPHLPGNPKPAEEGKHQTNQAERLIPPQCTMSLYELPALLFYEYLRRKLRNETMDSAEQIIKRYCNSLKSFFGDVSRGKVFPDDENELAEALNKDYGLRLSDIPERLKNVLLGNSFDGNEKLKKIVKTFVEERKNEIKEMKRCLDEGINHKLVKTGQAAQWLARDIMIWVPTQTREKLSGQKYSAIQANLAMVGNWEGAVSYGDLRQLFTAAGIIPESNLKNPNQHHPFLKDVLNGLLNDREHSVKSLYQRYLDVESSHISSLELKLARNKNCLDSFPSLHHNRMRWKQQDAAALAQSYLTVKNKAKDSEIILNSEKPIQLPKGMFAERILAMMKELAKNNGALNEGLEKIEKQEKGLKGNTAYLIGLYHTFAENDASQPYYNYERVVDEGKLAKSERKRMEQTIRRYKTQDILLFYMAREILALPVGNDNRQRFLLKNAMNNDLLSLPIDFSWTVRLKDGSAKTITQKAMKMKDYGNFHKFASDGKRLASLLEQQAETEFARADIEAELARYEQSRVEVFRQVYILESHAVMKLGVADDCDIKAREDLFYDSAKGKRCKLNSFNQLMQALGIGEKDRESLTKIRNAFAHNYYVDLKGIGFWGSVPKIPNVASKTKEWMVRKCNDLYGPRFGG

SEQ ID NO: 72 - protein, 940 aa, synthetic construct
MAKKKTAKQIREEQKAAKMQKIQTFVKAKEAKKENEKTASAVKLPVKKNRKKSLAKASGSKAVLIVGNDIIMTSYGERCLANLEHKITPELNTESLTVNNVLNNVNAKDGKNISFTGRISGLSVSSDNPLHFHQTEERKAPKPGTDLLCLKDKLEQWYFDKTFDDNIHIQLIYQIQDIEKILASHVNNIVFALDNILHATESETGDFLGMGYMRATNTFEEYRDSAISNVKKSYETFETYIKKKELLYFGEAFYHGNTCRKPEDIYHILAMVSSLRQFCFHSTFDDKSKSIKGSWLYQLDEQLSDEFKETLGILWAEATEKLDRDFLKTNTVNLHILCEIFDKEKQEDIINAYYEFLMKKSFKNLGFSVKKLRECMLEEAELNEFKEDKYNSVRSKLYKLFDFILVHHYKNDSSPESTALKNLLRTCLTDEEKEKVYVQTAKELTALYSYHFKEASVSVNARNIKEYQEKAQVYHISIADKISSTGIGLFSQLIYMLTLLLDGKEINDLLTTLINKFDNIIGFLDILDKMHLDTEFKKEYQFFNQENCKYTAKELRTINSLARMQKPSANAKKVMFRDALRILGMDNRSDEEIDKELDRTMPVGADGKFIKGKQGFRNFIASNVIESSRFRYLVRYNNPHKTRELIQNQHVVKFVLEGIPDTQIKRYFEVCKDKDTPDTSSKSAQIDVLAGILTNIDYKIFEDVPQSAKINKDDASRNRAEALKKQRYQAIVTLYLTVLYLVTKNLVYVNSRYVMAFHCLERDALLYGVAFPPVEKKWGKDYSQLTASLLKDETYTTYGHLKNQKGHRKWHVLVSRNLENSDKKAVHWFRNISAHISVIRNINEYIGEVQEFHSYFELYHYLVQKMIAKNNWYDAKSQPKTAEYLENLEKYHTYSKDFVKAYCIPFGYVVPRYKNLTINELFDRNNPLPEPKEDKEKKEV

SEQ ID NO: 73 - protein, 928 aa, synthetic construct
MKKRLSNPPARRQDSNPPSACKLYLTSFGKGNDAVLEQQIDTAADYAVSPISAEPSLTVTEAAEARVKFDSKRPNVKKIQLTADNPLHHSAGNPASTRRDILGLKNALEERFFGRTFDDTIHIQIIYNILDIEKILAVYATIISAALNHLMDESSDVSQSDVIGNIATQNPYAIFKDPQSRYDYRDPSLTPDQRKDATRIRKKIDANRAAFQALLATGRLGYFGFDYKPPRKDEKDKKKIKAAETQEKRLYHLVALAGQLRQWSFHGGDKPEDELWLYQLDSQLVGERKEFLDTLDYYYGDRFREINDEFIEQNKINLAILEELYPKEDFPEIAALYYDFIVVKSYKNMGFSIKKLREQMTTLEGASVITAQNMDSVRSKLYKLIDFSLFYRYYKDEARRQRAVNILRASTTDEEKEAFYAAEAEWNWNYFRGRFTDFCLKIGDWVKMDVDASRWNGILDLDSYRRTSSASYFSKLLYAMSFFLDGKEINILFTTLINKFENIASFITTAKELSIDVTFHENYAFFNQDCDGYAREIDVVRNIARMKKPVPGARKTMYRDALTVLGIPEHMQADMFDAELEKMLEKPKDEKGRKLKGKNPFRNFIANNVIESTRFIYVVKFCNPDKVRSLVNNTVVTKFVLGRMPETQIDRYYQSCIANPDSAAPLAARIDALADMMRNMRFEDFKDVQQKSGDPIENMRKERFKAIIRLYLAVVYQLVKNLVNVNSRYVIAFHCLERDCQIYTGKSVSKSKKYFTLIDVLLEEGDSSRSGYLARNVRMREHIAHDVDIGKSLIITTKSTDSATGEVKYSKLRIIGFYRNNIAHLTAVRSFADYIGDIARIDSYFGLYHYIVQRLLQSRDYTAEAFPDRINPYYASLDRYHTYVKDFVKALNSPIGYNLPRFKNLSIQQLFDRNELQPEPKDDKAEES

SEQ ID NO: 74 - protein, 880 aa, synthetic construct
MAKKKRMSAKERKQQQINLRIKKATEDSTKKVNTTVAVNNKPISKEIKKSKAKLAGVKWVIKANDDVAYISSFGKGNNSVLEKRIIGDVSSDVNKDSHMYVNPKYTKKNYEIKNGFSSGSSLTTHPNKPDKNSGMDALCLKTYFEKEIFKDKFNDNMHIQAIYNIFDIEKTLAKHITNIIYAVNSLDRSYIQSGNDTIGFGLNFNIPYAEYGGGKDSNGKPENKSAWEKRESFIKFYNNAKDRFGYFESVFYQNGKQISEEKFYIYLNILNFVRNSTFHYNNTSSHLYKERYCKINPKNNLKTDFEFVSYLNEFVKNKFKNVNKNFISNEKNNLYIILNAYGEDIEDVEVVKKYSKELYKLSVLKTNKNLGVNVKKLRESAIEYGYCPLPYDKEKEVAKLSSIKHKLYKTYDFVITHYLNSNDKLLLEIVEALRLSKNDDKKENVYKIYAEKIFKAEYVINPIKTISNLFAEKGDKLFNEKVSISEEYVEDIRIDKNIHNFTKVIFFLTCFLDGKEINDLLTNIISKLQVIEDHNNVIKAIANNNDAVYKDYSDKYAVFKNSGKIATELEAIKSIARMENKINKAFKEPLLKDAMLALGVSPNDLDEKYEKYFKTDVDADKDHQKVSTFLMNNVINNSRFKYVVKYINPADINRLAKNKHLVKFVLDQIPHKQIDSYYNSVSTVEEPSYKGKIQLLTKKITGLNFYSLFENCKIPNVEKEKKKAVITLYFTIIYILVKNLVNINGLYTLALYFVERDGFFYKKICEKKDKKKTNKDVDYLLLPEIFSGSKYREETKNLKLPKEKDREIMKKYLPNDEDRKEYNKFFKQYRNNIVHLNIIANLSKLTSTIDKEINSYFEIFHYCAQRVMFDYCKNNNKVVL

SEQ ID NO: 75 - protein, 1263 aa, synthetic construct
MAYDKPRPKRRQARSDFYITDKAIMGGYFNLAQLNFFKTLMEIFTKAGIDVSKIRQDNSPKYLMILIKKLSQDDETIDDKKWADALDLSNECLLKLQQLLYKHFPFLGPVMGGEASYNIYKLKDGHPEVKVANDVMRGVKLEDCLAVLRHFALCLNDCRNFYTHFNPYNSIDAQKEQYLSQNKVAVWLDKVKDASRRIVKQNNQLTSQDMEFLTGIDHMKPQDKVDEFGNIMTDRRGRPFKEFVEYEDYYFRIRGKRYLVDAAGTKLVDQEPRNALSDFGVVFLCTLFLENDQSRRMLDELRLFETGPYDGSRDGDEFKNDILREILLFYRTRVPRGKRLDPMDDTTLLAMDMLNELRKCPMPLYDVLSREGQSFFEDEVKRPNDFTPDVAKRLRSSDRFPYLALRYIDLNKCFDNIRFQVQLGKFRYKFYDKTTIDGEQVVRGLQKEVNAYGRLQDVERYRQEKYADMLQQTELVETGEEDITIANFIPDTPQSSPYLSDRTASYNIHNNRIGLFWNVLDEQEVLTREEKMYLPDLKVDENGKADVFLPAPKASLSVRDLPALVFYLYLQNQHPDLTPAEAIIQQKHNALVRFFEDVSTGRLLPVKGIAELKAVIDRYEYLTIHEIPEKLRDYLAGAVGTEDDDDCADRLDCYAMGILEKRYRQVRARIDQLKEARKMIGDKMNRYGKKSYIDVKPRLLAEQLAQSIVDWQPATDNGRHKMTGKNFQRLIAFLARYTDEVPGHELKDLMSRARLLDGPVSHPFLQQVLDKNPLNIEVLYDLYFKEEKLHLENYLEIETNKQGEEVFRKKASVDLSRIPFLNSGRLRFHKRDSAYYQRLAARYLQVDGRQSTILLPDGLFTPHILSVLKSEYHDLQDHLQDQELNQNASYLMSVYLEHVLHDSAQPFYLSNSNDSPFARRYDLFAILQNKKRGVELLPCPLTPVEINRRLTGKTPDDNAKVIERDIKALLDDMARKTEERIRHLPQGFYRKKKNQSQEEMAKLERRLKHKIIDVKKNERTIRRYKTQDMAIFLMAKQMLANQLSWQNQEGEVPFKLANVCNDGFLSQTMKVSFPYEVPLKEDKTKKVTIDIVQDNMSLKNYGLLYKLYHDERVVTLLQNIVDQQQISFAELTAELSLYDQNRSKAFSNFQQFEKLAFETSKEALTHPEHRGFFLEKVNKKNQVIRYERRNNFDALLDLLDAIEAHQLDPRERQWLTSVRNAFCHNSYYKIDMQQIEKKLPTIIQQIVEIVQRITDKASHPSNR

SEQ ID NO: 76 - protein, 1062 aa, synthetic construct
MARKLFSNETRPHLAAYFNMACHNAFVVLSRISEKASKSCDQRLEMKLSELPVISLFDTKKPEEKEWIMNRFEKSFPFISPAMKMNKISEAGYDDLQCSSRPYVRTTYAMKKCIVDIFNMLNFFRDKYTHYVFNDERNDNAEYRDIQKRVVEYLEACFTASCRIVKERFLLDKELEFLTKGRYERHGAKCVVNTRSPFALRDEQGMLSDMGILYFLCLFIEKQYVSMLFDQLGYKGYAIYENHSELRRKYIREIFSVYRIKLPRERIVSESAIEALGMDMLGDLKRCPEVLFKTISANDQAKFRIKAETSGEETLFIRKDSRFARLALQYIDEKEHFKNIRFHVSLGEYRYKFYEKRCIDGDTRVRILQKDLNGFGRLAEIEKLRTERWGKYIRPFESIRIDDVHTRPYITDQRAKYLFNGNRIGLCFNTKDAQVMSAGVYMPAIDGDNAPCVQPTCWLSVYEIPAMIFHLLLCKEDDALENTRGSDTESIIKNYVANYKRFFDDWAKGRWRRSGDAAKDFADIETEYSIKQRDLPQKVCDYITGVKGKPLQEKASAIVKAMRAENEEMIRRFDERYARAISPDNKFGKRSFIEIQPGRLAAFLAEDIVRFTPSVDGKDKPTGKNFSVLQSAIAIYSLRKGYDMLDELRRIFLSAGIIGQRQGKNHPFLDKVLADEPQDTMQLYRAYLVQRDVYLRRVNATKTYTSAYFIHTTRAKWAKRTDEYYNSLAKRYLSQPIELPRRLFEDDIKRRLIKRHPDMAACLQQERCNVAYMINCYMQQVEHDGVQSFYAMPRRYSCFADDTYRTVDEMQSYSHIDLLSHYLRECKNNASEEAPYIEADARRRFHALYKKYDDNERVIRRYMVQDILLFLMARDLLIKIKTDKKSFEEYRLQKVTPEGEGILEYKVPDFAVTLTFANGEKRTIRQHNLKVKNYGDFFKFMYDERVKTLLPQVKSLEIDREVLEQELQHYDSSRPDVFRLILKLEQFIVEHFSELKQQRVQFRDILDKVTLNTADKEVLRLLRNAFSHNKYPRLSQIEEYALPGVAVSLQHIAEELVTKAGR

SEQ ID NO: 77 - protein, 1145 aa, synthetic construct
MAHRQQWNKNKASDGKKPRKASWQWKQSMTTEMKPVMASYLNMARHNVYRTLIHISTQMQIAEQGDEDKLAKFEIWKKLEKAPAPEQMKLIKLLQKHFPVLQAFFNYEKKAGKVMVDTSAHDVRHFFVKQLLPTLSRIRNEYTHYAAKPRTQKEEGELRPYLRQALADSVPAVFDRFAVEVVEDNKCKKKKPTQPKVVSEAVKKIFPEPFDKKGNKKSIYNLVSGDAFSDLGIVFFTCLFLERRYTAMFLDALKPWPESFNEVQRKAVFEVFTYDHIRLPREKYDSVTPDYALGLEMLNELQKCPAELFDILSSKDQERLSVDIKSDDPDVVTDDGVTVKGGKVQMKRVSDRFARMAMMYIDRTNAFKNLRFMVHLGNYRFKFYMKQCVADKEADTLRTLQKEINGFGRIDEIEAARRQMYAPMFKATVKKENAAGVEVEELQPDHAGMKPYMTDTKANYVFDNNRIGLRAIGGDREPRLYLPSLTENGEPIDDAKQVKLYTPNAWLSVYELPGLIFYKLLCDTYPEQAEKLGDAEEVIKSYINAYRKLFKNIRDDKFDGWDEKRYSPLTLEDLPVKIKTYILKPEASVNPLFAKKAQIVIKEMVEATEKEIERFNRKLDRLTDREVRPDKKTDLRPGAIATRLSRDIMYFAPKSEAKDKMTSANFNSLQSALALSKYSVKRMRGMVDELGHPFIGEAFDNYAATNFKIYDFYKIYLESRLKYLKSKQGLGKAELEKLPFLHPDRAKWQKRDKKGIQELAGRYLKIGEVDFPHGFELPRGLFTARAEAIMREAGVLTEPAGDRKPSMTNLINHYFEHVLEDDNQPFYCWSKHYEVFDRLAAKKDDKHPTPQFLSPTQLCEKMKVRKRLRPSKFMLNKALESVNNGLPDEEHIKDIYDYRITSLAKERLKKDYAEYDDNERMLRRFAVQDKLIFLMAKDILLGVGGIKKEALGKFKLKDVMPGAKDSILETTVPFIITLTVGDTILTIRQKEEIKIKRYGEFYRYNSEPRLKSLLPYLTKKIGGNADAKLEIDREELEDELSRYDLKRVDVMSMVQTFEKGIIKQAGKAGIRIDDDTLINFNNLITKIGHVPYEGQGKILINIRNGFCHNEYAKDISIPEETSLPEIAEQISTLFDTTRKRPTTKE

SEQ ID NO: 78 - protein, 1190 aa, synthetic construct
METTINNRIGKGEYYTEESKEFLAAYFNQAIHNVFIVLNHIAKRFGMDELSSDEELKNWLIGRQREKKRNAIDRQRFLELIDRHFPFLRIANADKKDAKRENDLEDNLALLITLLNDLTERRNKYSHAITHASIESNDRELVWRLYSIYDANINLVKRDYFESNVHTEINEDPYEKQVEHLRRFCMNNDRTKVDEKGKKKPAMPNPRFRTPFLNAETNQLSIYGLVFFVSLFLEKKYAIQMQKNVYGLKDARDTKFKMTNEVFCRSRIIMPRVRLHSDKSTDALVLDMLNELAKAPEVLFDQLTDPFKEKFYIESIDSLEESDIITPVRAIRKQNRFMYFALRYLDESNAFSKLRFQIDLGNYHYHLYESKINDQTESRHLTRKLFGFGKLIAFEQEFAPEEWKMKSKDLDYYEGATQPFIAKTYPHYHLEENKIGILFNGQAEVQWPHLDVEEHESFPKYKRRANEKADAFLSGNELLAAAFCHHLYASIGKPNTVEKIIRDKYHALRQLFSDLKSGNLQNLLGDNTSNEAISQLLFEKYRLTLSEVPVRLHAFLSGQEQADTKAIARGKLELMAQQNKKRIERFDAMKKAVVKVGKAQYRTLRSGDIGDWLVRDFMRFQPIGYKRNQAGKQEPDLKSKANPKKYQLIQKSLALYEQEKNNLLGLFKSCNLLSSENEHPFLNEVVQSMPATWQDFYERYLHARSRFLEKCIEKGIKKNSYQACYSFLKIKPQLKDKEKLYQGWDAQMNLPTNMFIDAIHDWFRQTHHESLRTWFTQQEKPHQLIGLIRKYIELAHTDQIQGFYDMFPLRYDFYKKEFPNGLVLHERINKQKQIWEAQLIQTKKRLEDAASKLKKVKQQVESLPDQELRFRNETEAMVYFTKLFDSSIVKNAILKLQRDQKALRVNTIGEKIIKIYTAKYDAIHQEVRDFKSMLTTEKMIRRVKAEDCVTLFMLTDLMNQSQITIGQEQRTIKLSDIQPMGETQIQGILDAVQVLEQKLDFFSSDEQGKISQVKLGEWTIFSTDTKVKKQGNFKQLLKDRRLNNLAHYILPDIAGGAIRVRRNLLEMELDQYDRNRIPIIKLMYELEYAIYKVDPFSVELKYKKFSQCLREYAQKAVLNVEQVEHLNVLIAIRNAIMHNQYPNRDHLKAIVPFTVSEYAPVQEGLTIARQLLACAQVSVNIILSTISKFE

SEQ ID NO: 79 - protein, 986 aa, synthetic construct
MNEIKQPNNSKYVYAPYLTMAACNIDAVFYHLEDIFNHKQNNAIEIDDGITQLYKLKIFQDLGISNGSNDENTPVDFLRKDAIIKQICRNIPFFNILFDSKIFSNKSLDERCRCVDRYIRALFDMRNYYSHVLHEEIDITHQIPNIENDLNYIFEENRNTVKKRFVLNDDDIKHLKVFHKDKKGSNSYYKFLESGDHCDKLTVNGLLFFTCMFLEKRYAYELLKKHYGFKNSSSKMHKATLETFTVTCIRLPHNKLEVSDSKVTLGLDIANEICKCPDEIFSLLSIKDRNKFRIPIDKTDPEQNINEDCEDNDTQTILQKRYSNRFPYFALRYLEFMNHLPDIYFHIDMGTYFYDCYKKQLIDNSEIKDRRLSKNILCFDKMDNAVKTFNDSKNSGLYAAKYDEKNEYRNNTFPHYHINNNQIGISLEKYIPELRGKDTRLRKPDALLSIYELPLIVYLCLNNKGEDVTELIKNHINTSKLFFEYVASGGRYSIDNENMIIFNAGNKINSHHLPELFRKDKLNYKDLASKALKNQREKAQNIIDRYYTTKDRKGKILKNKRSLKTGHIADILMEDLMRFQPSIEYTAGKDKVSSPNYQALQKAFAYIGSRYMEIPNLLRKARLTHSENSHPFIDKCISPMPKNINGFFKRYLEEKIKYIDTIVAKGDFTNAYFLRDYIKKYGADLETERRNAAHNLIDKPADIPRGIFKDLFSTEYASPTYHIYKELLENEDDVQDFYHLKLNFPEYINDKQKYKVYQKINFIRACDIVSFYMMKDLIGIDNSSVKLMSSGGDKHILNLSQNVDIPVMLLRTIGKGKNTKTKINEQIISGKIKIKDYGKFRRLIFDKRLFSYSLYFNKNEEGSEKDKLIFDDIEFEFTEYDKSRLKIFELIHKFEERVIIKNAIALPVPSNSDDKKNKKYSYISFPDILKKSGLNKENMELLKNIRNAFSHHEYYVVKDLNANKREITKKLYDKCEKDIICITNSI

SEQ ID NO: 80 - protein, 1191 aa, synthetic construct
MLIIKPYGRSQTQHASDSQRNRLHLPSGQAHAEAVEQLQNNLDFVMAQWISVIDKIIRKQPQRSGKGDKKIAAPQVSTTQFNARKALGMAALQCIEKEFSELSDLQKKQWGWKVHPYDCTNLVEPQPKDRITGRWYSRFVGAIHPQDITQQTVPAIVQKIHDHLYQQALRPNASTAVHTQGHTTHQLHTIARNVHALKTPKASTHVSSDSAWQSYFLSNDVVACIYKELQDKHDQKDKTKHQSQPKPLIPTTTPKAPLFSDRATIAQHLFNHYAKVFATPSGTPTPVKDLLNEAHPLHAQWLVHQCIKATYKALFDNASIKGLKHIQHKLPANSEAMRQLIENRRKNHDIGHLVRLGKVLHYEAAERGQLPRACWGEISTPAVAEGSAYWLSEGQAEIKRSEALVRSFKQAITHAGHTLSQLSDWSGNGDIFLNASEAAKQADAKTVEQRVALLFGRACSDLFPSCYAPSGNLQAAIQALLAQSIEAWAQLRHASFHFKGKHVFLEKLQNSLAKNNVSTPELDAVAQKLWEQDGEQRQKRIRASLEAAHCLDHLSQAQLNAVYLCIAGDKQTRIGSSLDMPRLNRVLNRAQNTKLGMKPLTDGAPTLQLSTPAKRQTLENSPAQRCRYVLLKLLYEQDFAAWLQDTRQETIDKWIGGAIARNTKAARELNGKGLQPQTTIHAKAERLWHEQAQAPTAKSTSQANPIARFFHDLAAATASEFRVQRHYASDGEQAQAQAAYIDDLKCDVVARAFLTYLKNKWPWLLQDLAVQNTPSCMDALPADAHEALQLDNLWQQRLYFLLHMVPVGVVSQLLHQLRKWQVLSTQAEASKTAVEDQALYTHCLQVMVLYLDMHDAKFDGGTAIHLDDTHRQPLKDCFKRVEDFAACLPASANPSQPGDAHIPLRGLREMLRFGGAKVLAPVFRQHPISAAEYADWQKLQAVIKEAQKTREDLHAEWVKNRKGFTGQQAYAQALETCMSHRHLAHRVRLVDHLQLHSLLMAVLARLADYAGLWERDLYFVSLALCYHEGLDPAQVFNESGNHGNYFDGGQIVEALRNESSPSKSIQTQVAMLFGTDCKKGDPMVNIRNALSHFNMLRHTKHQTAPAPIDLTHWVNQTRRLLAHDRKLKNAVSKSIMELLEREGLVLTWQTNHQHQLELSKVDSKKIAHLGAKQGTEPHHSGAYCAMVRQIF

SEQ ID NO: 81 - protein, 1169 aa, synthetic construct
MLVIKPYGRTTTTVESNAQRKLNRKQTPWRADDVGTLNQEHDFLIAHWISMIDKIICKPKAIKAAEGQERKRSQPGKATTLQRDVRQLIGDAALDFFNPKPNREIWQWKLHPYEVGDAPTGQAAPNIKGRFYKAFVGHGVEPHQIDATQAKAITEKIRAHLMTAALKQQGNNPQSAQSESRLGRIAHQLGTITQNVHHKKDLEPHALDEAAWQTYFQKGDVIEQIAKALAAKYNKSDKSKQPAQPTLTDRATIAKFLFEHYALVFGKTTQVRDLVREEHPLHKQWQVHQRIKATYKAMFDNASMKGLKGIHKRVPKDKKEMWGRIHQRANNQSVAHLVRLGKVIHYQAAEECKTVRAAWHTLQTTLDASPYWLSDGQAEIKRSEALVRVFKLAVSHAGRSLSDLTQWEGGDIFDNEDKASKGAVAQEFGERMKTIFGNDKESVFPSVWATDDALSEEARQLLEQTIQAWAQLRHASFHFKGRDGFLNELKRSLSSEPHTLAYPALDQLSKKLWDEDIITRKERIKKTLEAAHCETHLAQHQLESVYKTICGENVTRYGSTLDLPRLNRVLNRARNADLKVDTTNAQVSLPMPAKNEVLEKSPSARCQYVLLKMLYEQGFSSWMQEKNLYEVDKWIVRAIERSNIAAHAINGSNKNNKQPIESIQARATRLWQSIGQKTGHDFSNDLLDGKSPIAYFFHQLAAATATEFRVQRFYESNGEAAQEQAAFIDDLKCDVVAIAFAKYLGSKFSWLLQGLDGTQTCSINDLQKATTTASVEIWQQRLYYLIHFVPVGVVSRLLHQLRKWHILTAKGKDRAPTPDNLYAQCAQVLVLYLDMHDAKFDGGTAHQLDDDLLKKLKSCFESEADFATLFPQGAEADSRIPLRSLREMLRFGALDTLAPLFEKHPITHAEYERWQALQGQIDDAQNLRAELHSQWVEHKRNFDQVLQYQAALKICEAHRHLAHRVRLIDHVQLHNLMMAVLARLVDYAGLWERDLYFVTLALCHHHQIDLNSLFAHTDKHGNCFFDNGQIVKALRKAESDECFTKVHTTLSALFGETYLGGELNGLRNRFSHFNMLQKKESASINLTNEVNEARALMVYDRKLKNSVAKSILELIEREGFKLSWKTNNEHLLERASIQTKRITHLGNKAEEAHHSSNYCTMVAHLFGTT

SEQ ID NO: 82 - protein, 1194 aa, synthetic construct
MLIIKPYGRTRTEDNESSGRQRKLVGKQIQLQSEPVTVIAEKNEFLMAQWISIIDKIISKSPVKRIIEGKIKPCIAPTQRQARERIGQAAIKFQPALKELEANWKAKIHAYKITRTVSSGDPKDRIKGRSYAKFVPHGIEPEQITTQIAEEIAKKIHDHLNHHALNSKGTGGKGKGSIAHQLGSIAQNVHQADKESGQEPSEVEWQKYFDHHDVVAAIAKAIQSNRPARTKPTLTPKETANTGQSPSDSPRRLTDTATIAKHLFDHFGQVFGQNAKVKDLLKPSHPQHGLWQVHHRIKATYKALFDNASVKRRKNMAIHMPLNKEAMMALVRHRTSNQDLNQLVRLGKVIHYEAAACGQSVRSAWSNIRPNIDKSPYWLSEGQSEIKRSEALVRVFKLSVSHASRTLTDLCQWQEGDIFLNSEDASKKLIPDRFVQRMQTLFGRDQDASDPVIPSAWHSNGQLHDDAQALLKETIDAWAQLRHASFHFKGRNGFLTQLTQGLSRHAGSSPPSKVALDTRARKLWDRDHLARESRIRSTLVGAHVETHLNPVQLEKIYTCITAKDTNRCGITLDLPRLNRVLQRAHNTLIAQENDDQILKLPQPAKREALEQSNAARCQYILLKLVYEQGFSDWLHAKGIKELDKWVKLAIKRTDESAQRLNTPYSDDLPVKARANELWQQHVRTLSTSDALGGMSAIAYFFHQLSAATATEFRVQRHYESDASAAQKQAAFIEKLKCDVVAIAFSKYLQKDFPWLLSDLDPTQSCCVSELAVHNNATPVELWQQRLYFLLHFVPVGAVSQLQHQLRKWHILSHHGAEHESSSLGQLYASCAQVMVLYLDMHDAKFDGGIAYLLSDEQRKQLEDCFELSEDFQACFPKGSVQDSRIPLRALREMLRFGGIELMNPLFVQHKITHTEFDRWTQLQSCIEKFQKSREDLHQKWIDHPGDFSKQDKEAYGQALKICEEHRHLAHRVRLVDHVQLHRLMMTVLARLTDYAGLWERDLYFVCLALCYKKNIDLTTLFNHEDKEGHNFFDDGRIVEALRKVKKDFQFPLFSEDPSLLLISGSTKLAGELVFIRNHLSHFGMLSDQSRSKSTQLPNLTDEVNKTRQLMAYDRKLKNAVSKSVIEILQREGLRLVWQMHDHTLQLDPNEPIQTQMIKHLGDPSSESMTESMHSKAYTQMVDQLFGNKQLNSQT

SEQ ID NO: 83 - protein, 1123 aa, synthetic construct
MDRKYMTLDDKYYFAAYINMARHNVYLLLADISTRMGEKVPNDDAKLIFPILQKLEPKTTTGKNSVSPDEQLKIIKELHKHFPFLKTMLYAYKKPMGAATEEEIQKMDYAPGDYYDLFTLFFKVLNDYRNEFTHTISQPNVKILGTEEFRVSYVFDFPANLLYGLRVTFDTAVRKAKTRFNFTPDDTKHLLRQGKGGKELVGFKYKFQAEGSKSLTIHGLTFFICLLLERKYATLFTQKLQGLKDKRSRGFKATYEVFAVHCIRLPNARYTSDTSNGALLLDMLNELKKCPTLLFPQLPAKGEQNKDQDAFRIKVEDMPGMEEEGDSGFVLLKRHEDRFSYLALRFMDEVKWFNLLHFPVDLGNYHYHLYDKIVDGLPRIGSLWEKMIGYGRLPDYQHKFLNKDYPAEWQLLWQNHELKKENENDKSSYMPPTMPHYHFPDGKADNIAIKITNPETLFWPAIHIDGNDKKAGKPAKKEHPDLLLSKYELFAFIFYGLLIGKDRIKKELEDKLVQYFNKRKQLYRNIINGKLLPLALPADIPKPKDKGKKPTGYDQRKELLNQKLAIYGCTADELPDEIKCFLMGVITESFEIKARYRLEDLIVDTEILQERIKRQLKEKRKPGSKKDVEIKAGVLAGFLAKDIMLFQPADKTEGVKASGKPTSTLYNVLQAKLALYGANVDTLERTFNECGLLSGSTKHPFLGQVVSRKPATIVDFYMAYLTARHSYLLKCETDKNYQAYQWLKNNQARKKTEPHFGQRLAAEMEKLPVVIPRGFFAESIKNELLALNNDKLNAAIVSARTPNTSFMFMAYLKEYLDDDVQDFYGWPRVYKIFDNFHDKRTKSEMRKSLKPEPLSEEARKGQMDELKKWIKETPNDEDYGKFKKRYDDFESNEKQIRQLKVQDITTFAMCDYLLKNINRNLINSDGQFYLKDIAPKGDKGILDKPMSDFGRVFDYCCTSKDFAGVEITIEGKTRIFQDDLKVKNIGDFNKFIKDRRLPNLLAYLQKEQIHRAELEKELERYDIVRIEIFKIIHEFEKAILTKYPGIDGKDFDNIISHFQQSNNLPELTAMQIKKIRNAFSHNQYPDPIYFLNNEDLKLIGTTGVELYTDYFFNFIKTILVSEN

SEQ ID NO: 84 - protein, 1114 aa, synthetic construct
METPATPNYKRFDYESDKAFYAAFLNTATQNVFIILRDISESLGLGFDLSNDDNMLNVNLWNILQSNIEPELSLHIIEKIERQFPFANYLAKNYAFYKRKERTAEPNDYCKVFEMLIGQLNSYRNYYSHAVHDYVQMDPTIIKGMQVLFDAARREVKVRFALKTKDVDHLVRLSSRKVFGKNEAYEKETFEYRFLDASESITEKGFAFFICMWLQRKNAQEMLKKMTGFQKSDSPSQKATLETFTFYSARVPQPKLTSDNTKEGLLLDMINELKRCPKDLYPLLSNTDREKFKSIETDKDTSFEDEYEAMPILKRSSNRFNYFALKYLDNSFEKIKFQIDLGNYCFHVYDQQIDGVVKKRRWIKKMLGFGVLEDFADRNRPDEWKEKIQKIEGRHHKSDDVYVEETTPHYHINEQNIGLKIYDNYLESKKERKIWTPLPEFAKEDKQRHNETKPRNEKPDCWLSLYELPAMVFYQILFQRGYSVLSAEKIIEIHKERIERFFEDVENSRLNPGITNDALLAELERRNLEKSFIPKAIINYLLSKTTESFESLAEKRLNELRLETIDYLNIIKRQRIHFMDKPGSKNYIEMKSGEMANFLAHDMIRMQKPVGKEDGKANSTEFQLLQAKLAFFTVNKSTLFETFKLCNLVDAINAHPFLFNINISECNGILDFYINYLEQKVAYINLCKREKRYEDYHFLKIGERRRSSGKEYIGKLSKELKDDAVMNLPRGLFLKPILEALDSKDKTKRLVTEFKKLDRINAAFIIEKYFAYVKADKPQEFYYYKRSYELLNKILDNRKDFEKRKTIAKQYFDTNELTQMTGKIEGNPKENPITRLLPVLVRNHIFNNRIKSEDEKLRVKKVYFEKYKDFTESEKQFRLAKTCDIVLFMIADDMFRKNFVVDKSILKNKNKVSVQDAVEIGKGYKLSEIKPNSDEGFLSLQTRVELQIQDKTIIKEQIKIKNYGDFRGLLKDRKIGSLLPFIADKEIQFEALQKELEFYDKARIDVFAKIFEFEKSIIAKMNLQKNPEGFINHKDILKSLISENDERFILVMQLRNAFSHSNYPDYSLFKDKVADYGFNDLKNHTSNDDTILVKSFAVQFKNLILSYYDELSRI

SEQ ID NO: 85 - protein, 1109 aa, synthetic construct
MRIPQLIAQNKPVFGTYATMALKNVQIVLDHIQKIESLQDQMPERRPEDFWVHPVMQFFYSERYATNVDPEKADAIKERLFRNFPFLKIMAENQRDYRCNKDHKGKRGYRNNNIDSSNLEINGSDIYYVLNNMFRVLKTYRDNTMHAIIKDDKIDRNDSPFLEKNESPLSFTINNYYTVALRNVKERYSYETSDLAFIQDYRTDKRTLKTDFNFFLSMQALNGDPTGRIHLSGVGVVQLICLFLEKKYINLFLSKLPALWGGYDESSEEARVIRRSLSINSVVLPKERIRSDKRSMSTALDMINELKRCPRELFDTLSQEDQDRFRVVSSDYNEVLHVRHSDRFAQLSLQYIDSNELFKGIRFHVNMGKLRYLFSANKSCIDGGVRVRVLEQPLNGFGRLDEMEQYRRQNDTTYGDSNIVIRDFENVQRDAACADNYPYVVDTYTRYLLNNNKIEMCFSNDKVVPDIELDGGKWYVGKTIPHCRLSTLELPAMMFHMHLLGAEKTEQRIKSVYYNYKKLFTGLKEGTLTKENIDSFNICRSDMPQKVLDAVSGEDKTKRVSSYVEDTLKELLEETARLIKRFEETRKAIGSSANKQGKRNFKSISSGKLADFLAKDIVKFQPSLEKDEYYGTDRMTGLNYRVMQSSIAMYNSMGDKKAMQDFYNMFKAAKLVEDNKKSHPFLAVALKRIPKNAIEFYEQYLKARKQYLEKKIVEFNKTEHVRMFAANLPFINIERNKWASRDEDFYQILGDSYLEVSPIELPRQMFDDEIKAKLKQKPEMQDIDFDKANVTYLIGEYLKRVHNDNFQEFYDWERNYRYMDMLECKVNNKNSIEKQYLTIAEREDAWANREQGVKRYTQWANDKKLSDAKFKNMPETEYAKIVATRLSSSRNDYQKSEKHIRRYKVQDAMMFFMVKDSLTKNINFVAKDFKLQDIMPDADKGILSGIMPMDFVFEKKGKVYTISSQGMKLKNYGDFFALVNDKRMSSLLELLPTPQIGKEDIEQEFKGYDDSRVDVVSVILDFEKFVYNKYPDIKNLALQGNHFDFLDMLKELINKGDLTENEKELLRKIRNAFSHNSYPEGGIVEIRTLPEIAKHLIRVFGNSIERIQH

SEQ ID NO: 86 - protein, 1380 aa, synthetic construct
MANFQEPARHIFGSYLNIARANFYKTIFHIFSISGIDCYTQKGDLYFKEDNLDKVIKVFYLISKGESTKDEGTKVSLEEEIKASIDTVYEVIKKCYDNRWNNEVKQYTNLTEREKNARKEAFKAPLTDEGPNGEKARIRNTFTIKGEQEERFRKMLFRHIPLLAPIMANVVAMQFKKNVNEQKESNKAMHDASLTDCLKELYSIAQCLTDCRNFYTHMNPYNSIEKQKDQFKLQNIIAGNLDKAFAASRRIAKKRNSYSESDLTFLTGHQDDCRMQEVFVLDENGKKKWKVEKNEKGETKLDKEKNPIYIYKKVKAKDDKGKEKRDENGKPIYEVLYEDGKPVHEYETKLIEREDFYYRIRGIRQILNPNLTPNGEVCDGLSAFGMLYFCSLFLSKELTVQLCTETQIFVNSPYNNDNNKKSNIILNMMFVYAIHIPRGKRLDSECSSQALALDMLNELRRCPIELYNVLPATGKREFEDDIKHENDRTPELAKRIRSKDRFPHLALNYIDSQGLFENIRFQVRLGSYRFCFYDKICIDGKKHPRQLHKEINGYGRLQDMEKARKEQYGHLFQLSRDESVWQKDENAYVNLRQLVPVKAGDPAHITDTLAQYNFYQNRIGLFWNTDDETYLTDKINAQGQIVGKGLYLPPLSAVDTPTTTNRYKRKAPIDMPAPLCSLSTYDLPALLFYEQLRRKHQLEPNDFPAAEDIIIRQYENMVRFFTEVKDMGTFDNDDALQEKLKEYGLSKASIPQKIYRHLVQKTPDNAKDFEKSAKAELRRRLHIAEAKLSCFDKDKEKMESDKEDDRKYKKYGSKYFISIRYAQLARYLAESIMDWTPNAKQGKDKLTGLNYRVLVSSLAGFGTRYSDEDILQILADAHIYVDEKNDHPFIGYVFDEYPTDIEMLYSEYLKREIKEIKKYISVGIDAKTGEETITLKKDASGIPFLHHDRKRWQQSSIAELTDRYLHIKEEGKAEPGRATLLLPDGLFAPYIVKMLEKCDSSALENCDDKSNAAFLISRYFENKCEKSQPFYDTTEPSHFNDELRKVTPYKYSRAYEYFKLLNGGKDIYLPITEIKRRLADKERRIDANIKNLTDKGNYQTIEEAREGRRRKLERAVRDMQDNERAIRRYKTQDRILFMMAKSMLGDIVNQNADLFKLENVCENNFLSQRVKAQISVKSNNQQITIQKDDMPIKDYGKLFRLLNDERTVQLLSYSILTNPPLIDFDQISEELKQYNTIRSSAFKSFQQMEQESFIQHERVLTDPENNDFYQGGRRYKNNEQTKENDAKRNNFSSLLKILQCLTPEVMNMFEENDRQLITAIRNAFDHNSYPNWEVCRQLLEQEQQVNANIQLELSQVAAFLISKIRNYVKQIEEVCHSSHQ

SEQ ID NO: 87 - protein, 1113 aa, synthetic construct
MPLRFKNSEERKPVLGAYAAMARNNAYIILSDIMERLHIEQPPLPDPAHPGQCLDKEAHLDKLSLFPQNNDLMPETKDKAMKLLCSHFPFLQTEGDLRIMNAPDGREQEKIPITYEEKCRTLLDALAVLTYLRDANLHYLFNDRRAEHLEYRLPESKACHLLRLVLKAAPRKISERYKGTGLMPDGALDFFIKKQYVREGRSFKFNMNWLFSPQREPEKREMDVYRKVELAGGVERDLVANPDGTPARFNRLSLFGEVLLISLFTEKRYIPDFLKACGLLTDNGFTETTQDGTLSQQRLIREIVAAYGIRLPKRRLDITMDADQVMLDIFNELAKCPDELYLVLPEAKKKELEAVNIDGETVIKKRHSDRFVPLLLRFIDTNELFPSIRFQVNSGYLRFLHHEKAAYMDGVERPRILQDAVNGFGRIQEVERTRSASDTYLGFPLYAPSPDDDAPMSLPCITDSASRYIVNGECIGLSISGDRTPVIIQDGGKYRVRSPLPDCWISRYELPAMGFYLYLCKKYDLSVSAEKIIIDKVNEYRSFFQGVANGTITSLKGITLAEKDIPGKLLDYLNGKTDSSDFNRYKKNLIQSLLEKTENRLKRFLEDMAMVGSKENRIGKRSFVRVLPGKLASYLADDIVFFQSYPAGHPEKRLTGQQFSILQGLLATFPPDIEDSCRRAGLLSGETAHPFLKAVFDSIPAKDRNTLVFYEIYLKRKIAFLKGPIPDSAPFLHPGKVKWQKKDAAYYKALAQRYLDGGKDGSNTGILLPRGLFDQAITDVLTKRCPGWSRAIQNTDHANTAFKIITYLLDGQADDYQWFYYEEDRLQEYRFSQLIISQNAVRNGWKDLKAILQEEGVKLKGNYYKELEGRISALRRIPPERLARNTMKREELRQALRSSYDRMCENEKSIRRIIVQDIVLFLLARWRLDPREKLNMSMIGQDESKLMNQVVTVDTLYKGQYRIRQNDVRIKDQGVLFKTLNDKRIDSLLDQLAVGEGEVIDLEDLIAELTRYDDRRIPVVAKIMEYEKRVLKNHPELRDRSGRMDFKSVQRADEASSPQKKVVLRTVRNAFSHNAYPDRVVKAEGEEGIEIYNPIIPGMADGISGTTNKLVDE

SEQ ID NO: 88 - protein, 1394 aa, synthetic construct
MGKIVKPGEKIREMKETYKFRVNKHPFSIEEVGKNICGAYFNIARQNFYRTLLHIFSSVGIDCYTSKNSLFVKEDTMASALEALQAIEKDKNTKEKVTQAIESLYQLVENCYDMEWELFCQKEYGGKISSINAELKKDLSEDLKNQLNTEKEKIEKEQQDKQEEFYKDIENEKNRLRQSFILKSEQEEKLRKLLFKHLPFLSPIMADVVAYNNSHAEGDTINNGVMKDVTLAECLQQLVTIAKCLNDCRDFYSHYNPYDSVEVQIEQFKRQNDLAIKLDKVFVASRRKVKERNQYTETQLEFLTGKLHYRNLEKKERDNNGGKNKIPEERRYYYYRIRGERKFKDVENFEDYKDKKSPAMSDFGIVFFCSLFLSKEYTTLMCNQLELFDHSPFTEEANNIVHNMLYVYRIHTPKGKRLDSENDENALGMDILNELRRCPMPLYEVLPPLGRKEFEDDVRHQNSRTEEISKRLRYVDRFPSLVLKYIDAQKLFSQIRFQVRLGSYRFSFYDKICIDGEPHLRILHKEINGFGRLQDMEKLRKSEYGAYFPKTRQDNVWQRDENAYVDLVQLVPNKAEDDPQLTNSIAQYNIHQNRIGLFWNQEGNSILVDKKGEDEKPLYEGYYLPPLSVVKQTTSEPEKDKNKALVEMPAPLCSLSVYDLPGLILYQHLVATQQGCESVDDVIIHKYQKMVSFFNDIIEGKLQPQDSVAELDKKLKDYYDLSKASVPKKVYRILSSQEFNREEDLKAFALNALTRRLRNAIRRKTRFSEDLAKIGQKDNKYGKKNFVDVRHGALGQYLAESILDWQVTFDGGKDKLTGLNYRVLASCLAKFGDGNTNLNYIKTILRKAKILANEGEKIANEHPFISKALDNYPDNIEDFYLDYLDAEIEYIKKYVDIEESGQEITKVTLKSDADLSKLNFVHSERKRWVKSAAEDLKELAARYLYVEDRNVNGEVVTHRATLLLPDGLFASPIVEVLKKRYEKDDPIMAALNNENLNHNVDYLVKLVFEKENAGDTSQPYYNSNFEVLPVYNSNTVPDFLRENPGNNKYVRGYELFKAIHGKPIFYSSDEIQVFLSKKITDRNTESPLKIVNRQGEECCKREIHAKIDANVEGVRTKGDFDSLEEARNARRRKLEILLKECKESEKTIRRYKAQDMILFLMAKNLLSNAIGESDKFKLSKVCDDDFLDQKINAHITLHLDDYTVKIQKEEMPIKNYGQLFRLLSDNRVMTILSYPSINEATLEYDDLIEELSIYDERRTSVFDVAQKLERASFVQHKEELTNPENDLFYCHNKRYRVNSGRENQPKRNNFEAMLKLLLKMTPQQQSMFSKVEQDFIKNIRNSFGHNGYPIRNTIERIANGNDPKFADLKEMQLKGIASLFAGKLLDCLNDNNIE

SEQ ID NO: 89 - protein, 1101 aa, synthetic construct
MKLSLKPDSQLKPIFGAYAAMARNNIFLTVLDVMKQLHIPQEPLFDPRGNELDLEANIWKLSLFVIHLKPEQSSKADKLLRTHFPFLDLLNDIKIGSIKGESFHYNVSFKDTKQLLLNGVNVLSHLRDINLHYKTNDGKINDYYYRKYENVWSNHLIGLLKAAPRVIKERYKQTSLLSPQSMDFFTKDSYLKNTDGYILNPDWLFCPTRKPGDNELYIYKDKKPYRVEKERFDRLTRFGEILTIALFIERRYISDFLSECGLLGQFPSSTNDGSISQRRLLKELISVYCIHLPNRRLDISIGETQIKLDMLNELAKCPDELYMVLPDTIKTKFEIIGIDGRPVFMKRYSDRYPALLLNYFDTTGSFEKLRFQVNAGYLKYVHHGITDYMDGVGRVRIIQDGLNCFGRRHEVESKLKEQFSIHGFPVIRNNEEEANIDYPFITESGTRYVFNGDMIGISLYGDIMPRFEQYTENNTVRYRVRNTTPDCWISKYELPAMAFYYYLSKKYNEGVSVEQLLSQTTEQYRKFFQGVSDGTIKSLSDIDIPIKAIPQKLQLFLKGESSHEDYNKFKERVISKMIEETDIRLSRLKDNLEVVFQRDNKIGKKTRVRLKPGVLSDYLAKDIVRFQSFPDNHPEKKMTGQQFSILQGLIATFSEELEVSCKRAGLLDGPSSHPFLSRVFSRHRGQMRSTIDFYQAYLEERRAYLSGSIPDDAHFLHPNRVKWSHDKQESYFRSLSTRYIKDEITGERIGIFLPRGLFLKPALKIIANNCPKTARFLKEQERINMSFLILTYLEEELQDQNQGYYYDHLETGNGEYDFYKIIDREKKEFGDKRLGYIIRAERDSCQNSLYFFQLKNAFGHVRESARPIAGTKELAEKLRAAYNKMCKNEKKIRQYMIQDATLFLLSRDVVGPAGGQMKLADIDPTGNSVLEQTVDVTTNYKGKTIRQRNVKVKNYGELYSVLSDKRINTLLEYQPKTENSIPLEAIKEELVSYDHERVPVITKIQGYERAICEEKPELFSDEDARYDFNDIQNADTKTPNLNKVALKKIRNAFSHNQYPAPVVKQGNKEIVIFTHSLPDVAREISSKAGELTNWTPEEGSE

SEQ ID NO: 90 - protein, 1262 aa, synthetic construct
MARTNFVKTINYILPIAGVRGNYSESQINKMLHALFLIHAGRSSELSVEQSNWKKRLTLNVEQQARLQRLLFKHFPVLQPMMADAAEHKAYLAKNKKKSDVQTDDDVFAQFKGVSLAECLNVVALMADTLTECRNFYTHKDPYNTPEQLEKQYEHQEFIALKLDKVVVASRRVLKDREGLTVGEVEFLTGIDHMKQVDKKDEKGNVIYVEDRGTRKKAKAFVEYDDFYFKITGSRTAGGKACSALSDFGLLYFCILFLSKPYAKLFIDESRLFEFSPFDENENIIMQEMLSIYRIRTPRLHRIDSRDNKAALAMDIFGEMRRCPIELYDLLDKEHGQPFFHDEVKHPNSHTPEVSKRLRLNDRFPHLALRYIDEMELFKRVRFQLQMGAFRYKFYDKECIDGRVRVRRIQKDINGYGRLQDVADKRMERWDDLIQKREERPVKLEHEELYIDLDQFTQDSADSTPYVTDRRPAYNIHANRIGMFWEESQNPQGFKFFDKNGMYIPVLSVTDDHKAPIAMPAPRCTLSVHDLPAMLFYEYLLSQLDQEARKQYHSAEQIIIGIEADYRKFFGAVADGNIKPFASSEKFADYLEENYPSMLLSDIPQKIRQYLSSEHLSYEGKPVTVRERLVEVTLKHLAERMERLERRLKNYTEDLKKIGNKDNKIGKKDFADVRHGALARYLVQDMMEWQPSKDGKGADKLTGLNYNVLTAFLATYGTPQASIADSDIAKLSLKEVLRNAHLVGGDNPHPFLEEVLAYDNKNIEDFYLNYLTEEVNHLNSRIQSLSSNPTYKALESLPFVHHNRIRYNERTDEEIRALAGRYATIQLPDGLFIPNIVDLLENQYATNTDMQKALSFEGADHLNPTRNATYLISQFYKTVLHDNAQPFYQTDKSYTRQQDGQPPVAFSFRRAYDLFTELNNDKEDYFPFELKPLFLTSEEIQQRLTEKRLGKDGNPIPQRENGEIKKDAQGNIIWERKITHDVDIFVNTLSNKDLKCSKNEVKEKRDAKREKMKRMVHEIKNNERTIRRYRTQDMILFLLAKKMFVDLLGEQSRSVDWKQLRLSKVCNDAFLRQTLTFRVPVTVGDNTVYVEQENMSLKNYGEFYRFLTDDRLTSLFENIVDSIEPDKKTGERVISHTDLMSELAAYDQRRSTVFRHIQQIEDIVISGNAILANPDCDNFWVDGKRGELAKRNNFASLLKMIDLINTTSLTDDERTLLVAIRNAFGHNSYRVDLKKIGGINNLPEVANSILKHLETLSGFSAE

SEQ ID NO: 91 - protein, 921 aa, synthetic construct
MSKNDNIKSKAKALGLKSTFQVGDEVVMTSFGKGNKAIVEKIVRGTDVQSVPTEPNFSAEIEGKKFDLVGRAHIQTKSDNPQYSKKRTGDDMIGAKAALEKRFFGGTFDDNIHIQLAYNVLDIEKILSVHINNIVYTLNNIRRKDNAEDDDFIGYMSTRNDYDTFIEPRKHNISEDAAKSIDKSRASFEEYLQPPVKDCLHYFGNTFFAPREIEKTYTDNRGFERKKKVTVNSLIDEKEIYYIFALLGGLRQFCTHDNKSGRNWLYSLEENGINSDAKAVLDKYYNSAVARIDESFVDNASKTNFKLIFNAMDVSDEALQDNIAKAFYKFTVCKSFKNMGFSIKKLREQLLELPEYEGLKDKHYDSVRSKLYQIMDFVIYLSFKDEKFKKDNEEKINNIVNELRATLNEEDKGRVYASYAERMKSELKPAIARLKSDIDKIKDSRVKEFELDASVKYRLSKVVESVRLKDRATYFTKLIYLTTLFLDGKEINDLLTTLIHQFENIASFIDVMNDRGIDCRFSDGYKLFESSKQIAFELRNVNSFARMTRTSKDDENATHMMYIDAAEILGTDYTEEQIEEHLNLEKKRMIPGTKKADMNFRNFIINNVIKSSRFNYLVRYSNPKKIRALADNEGVIRFVLGELPDAQIDRYTLLCGFNPDADRQEKTDKLAKAITGLRFNDFENVKQGANTEGESQESIDKAQKQGLISLYLTVLYLLTKNLVYVNSRYFLAFHCLERDAQLLGSGAGHHEPYVALTQRFINEDKLNEHACEYLKTNIANSDEYTIRIFRNNAAHLSAVRNANLYIDKLKEFKSYYEIYHFLSQENIYGKYCVDKKYVTADENGSKTISVKISKDYCPQVYIDKSLEYFDKLNKYGTYCKDFTKALNSPFGYNLARYKNLSIEGLFDRNRPGDKGENTFED

SEQ ID NO: 92 - protein, 1062 aa, synthetic construct
MNFEENGNKYLFGAFLNTAYDNYNEVISHIYDVIRRITNNNPTEQKSSSQALASEEPISSEEKEKMFFVCTILIAGNATSRKIESILKRAFPFWDDFIEIHASLSAQLDKTESIFQLQKNCVEELFTALESWRNYTTHYIHPEAIASPTINLLLKSCFNQGIKEIKKRFNTKDEQLTHLYEPELFHNKETNKDEIKCYHPANYYRFANENGLLTEKGLAFFTCLFLYKRESYLLLNQLKGFKRADEERYRMTLEAFTVMRFRAPKQLLKLQQQQLDKVSLGISMINELAKCPKELYDCLENEKRRQFEVYPDTETTLYEQEAIGELIRYKDRYENLMLKALEHSSECKYMGFYLSLGKCYMKCYEKHYIDGTTDNRYIVHSLYGFGRLQNASTDHKNHLSSFGEELQTHSQLPVCHFATEDDAADSPTSVPYISESYPSYVLNNNNIGIKWLNSSEKTEYPNFNLNEGKVSCPAPDYWLSKYELPAMAFYAYLKEKHKNKLQEYPSIKELIDQSHPEATKTSSSTIKDRLEERLKRYKVDATKKLKRLAEKPDGVQSGRLADELARDILWLQPSSPKEGGKDKLTGANFQALQYALARYDFMRTELPRILTAARLTGSNNAHPFLDKINPQDYSRLTAYYAGYLTQKIVYIDKQLEKLARGKVNIQFHPTRKLIRQSQTDSVEHEKETVFLPRNIFTEKIEQALCQIQGNFKLNIEKARISGKKLNASKLILIYLELYLKDEVPEFYNAKRKYPCLCYPLTPSEKYTLKEYQDTEERSKRIDRLKCFYNFKEVAEKVYLHKELSEDENKRYRKYIEVQKVIDNEKIIRLRKVQDITLYLWTRLFIEENPEQIFFSKNEKPENSLFKLREMNNAILDNTTSRKININTPNGNVSIEDEFKIKDYGRVTALTTEKLPQSLIKFIAILNKPLNKKDRPLLSYDYIYHETNAFYRYRPEIIKMAQDIENKIINDLKINVKPQAESYYNFRRTIQKLENKSRDINIELLIKIRNAFCHNEYKELDNDQYKYLNSLFKLSSDIKQTDTLAYLLYILFETEYQKVMILK

SEQ ID NO: 93 - protein, 1290 aa, synthetic construct
MANTQFKLKSVDYSKPYDEQPECKRHVVGAYANLARHNMTLTVNTIMQAIGMEIFDENNIGDAFNSSHRKKIDALDNIQKVNLQKRLYRHFPFFKRMKLEDEDKKSVQLTTLLEVMSDFTSCMAIIRNFYTHYHPYNSPDEKKRQLELKKRMGKRLQFLYENTSQMFKTTEALDHESNEVLSALRIPEDYIEEILPGDKEYDNLFNLINDPRTSKFKKQGLKLNQQTKVITRKKVRFVRNPDYQAYMIDETNGMSDVAIIFFLCLFLDKKVSFDMMDEVGFTKQIKFNGPQADRQLLYLKEIMCMNRIRMTKAKLDSEMTDTALALDMLGEVRKCPKALYEVLDKDARNEFKDDATVQWETEHGKEAVSTEALASESDEDELTDKNTPRSTFVRWDDRFPQMALRYIDYQGLFNDIRFQLNLGKYRFAFYQHDNKQSVDNEERLRILQKELHGFGRIQEVEEKKNEKWKELYDEKTVKDGLTQKKPDEAGQAPYITEQYAQYAIDEKSHSIGLRWEGWDKKDKSKGHYGDLDKLKMFIPYIPSKPKDEEQQTNQAEDLMAPQAMLNLYELPALLFYQYLLDKYKSDTSDAEDIIKTSFTNLVNFFNDVESDVLVPIDDPDENERIDKLSSLLEGYNLQMSDIPEKLRNYLCNKDIDYDLKMEKSAIGRLEEKKKQVDKALSSYKDKKKIIGSKDNKFDKMRASIKTGQLATWLIRDIMDWVPNNSSARNRLTGQNYTALQATMALFGQQANSNRSYLESCFRSAHLLPLDGKPYDKNTHHPFLEDVIQAMEDETLESFYEKYLDFETKHIDKVIKTLENGTDFDDYYKVPFLHCDRQRWAGPDKSLAAQYLKRPIQLPNGIFTKPVFNLLSTIDNKALRKALEESQQANGENPPLANNVAFLMKLYFEFVEHDHSQPFYYTTTSDGNKSHYLHIYRIFKKLYGQPIPHSNKTTVPAYTIDEIRHLRKQAIADIEEYVDNEIEKWKRTKQDRFESKLRKKLKKENDKRYKKHEKQLNINEEIQKVVKKEIDTMRTDMTSKMKRQLRSVYDNERTIRRFKAQDMMLLVMARNILKAKSNDKDFTDGFCLENVFSDSLLDKPIDFEWKVNIKGASKTIKQEGMKMKNYGQFYKFASDHQRLESLLSRLPDSLFQRAEIENELAYYDSNRSKVFRQVYIIESEAYRLKPGLQDDANASKDWFYFTDKKTHKQRSIRNSFIQLLEILAAGEDGILDNDEKIALQKTRNAFGHNTYDVDLNVVFKGKENKKKIPEVANGIKEKIETQTEELKRRSK

SEQ ID NO: 94 - RNA, 53 nt, synthetic construct
  source 1..53: mol_type = other RNA
gactgaaccttaccatgtagggaattgaactcctaaaattcccttagtcagag

SEQ ID NO: 95 - RNA, 59 nt, synthetic construct
  source 1..59: mol_type = other RNA
gttgtagaagctcttattttgaagggtataacaacttcctaaaattcccttagtcagag

SEQ ID NO: 96 - RNA, 52 nt, synthetic construct
  source 1..52: mol_type = other RNA
atgccttaattttggaaggtgagaacaactcctaaaattcccttagtcagag

SEQ ID NO: 97 - RNA, 59 nt, synthetic construct
  source 1..59: mol_type = other RNA
gttgtaactgcccttattttgaagggtataaacaactcctaaaattcccttagtcagag

SEQ ID NO: 98 - RNA, 59 nt, synthetic construct
  source 1..59: mol_type = other RNA
gctgtagaagcctccgatttgtgaggtgatgacagctcctaaaattcccttagtcagag

SEQ ID NO: 99 - RNA, 61 nt, synthetic construct
  source 1..61: mol_type = other RNA
tagttttattacccctacaaacagggttatattctaactcctaaaattcccttagtcagag

SEQ ID NO: 100 - RNA, 59 nt, synthetic construct
  source 1..59: mol_type = other RNA
gttgtaactgcccttattttgatgggtaaaaacaactcctaaaattcccttagtcagag

SEQ ID NO: 101 - RNA, 46 nt, synthetic construct
  source 1..46: mol_type = other RNA
gttgtgcttaccctacaaaattatcctaaaattcccttagtcagag

SEQ ID NO: 102 - RNA, 59 nt, synthetic construct
  source 1..59: mol_type = other RNA
gttgttgaatgctgcattttgggtagcaattacaactcctaaaattcccttagtcagag

SEQ ID NO: 103 - RNA, 49 nt, synthetic construct
  source 1..49: mol_type = other RNA
agtccccgctcgtttcggggtggtcttcctaaaattcccttagtcagag

SEQ ID NO: 104 - RNA, 58 nt, synthetic construct
  source 1..58: mol_type = other RNA
gttgtttttattcttcaaaataagagcagttacaatcctaaaattcccttagtcagag

SEQ ID NO: 105 - RNA, 59 nt, synthetic construct
  source 1..59: mol_type = other RNA
gttgtctttaccctccaaaccaagagcattcacaactcctaaaattcccttagtcagag

SEQ ID NO: 106 - RNA, 59 nt, synthetic construct
  source 1..59: mol_type = other RNA
gttgtgggtattctgcaaatttagggcaataacaaatcctaaaattcccttagtcagag

SEQ ID NO: 107 - RNA, 59 nt, synthetic construct
  source 1..59: mol_type = other RNA
cgaattccgaattaacctcgtgtagtgacgtcgttctcctaaaattcccttagtcagag

SEQ ID NO: 108 - RNA, 59 nt, synthetic construct
  source 1..59: mol_type = other RNA
gttgttttcaccttgcaaatataaggcatttacaactcctaaaattcccttagtcagag

SEQ ID NO: 109 - RNA, 59 nt, synthetic construct
  source 1..59: mol_type = other RNA
gttgtaactgctcttgttttgaagggtaaacacaactcctaaaattcccttagtcagag

SEQ ID NO: 110 - RNA, 52 nt, synthetic construct
  source 1..52: mol_type = other RNA
tgctctcagttttggagggtaaacacaactcctaaaattcccttagtcagag

SEQ ID NO: 111 - RNA, 52 nt, synthetic construct
  source 1..52: mol_type = other RNA
atgccttaattttggaaggtgaaaacaactcctaaaattcccttagtcagag

SEQ ID NO: 112 - RNA, 59 nt, synthetic construct
  source 1..59: mol_type = other RNA
gctgtacctaccctgcaaatcaggagcctctacagctcctaaaattcccttagtcagag

SEQ ID NO: 113 - RNA, 61 nt, synthetic construct
  source 1..61: mol_type = other RNA
aagttgtcatacccctcccaacgaggggcttctacaactcctaaaattcccttagtcagag

SEQ ID NO: 114 - RNA, 59 nt, synthetic construct
  source 1..59: mol_type = other RNA
gttgtagcaacctatattttgttaggaaaagacaactcctaaaattcccttagtcagag

SEQ ID NO: 115 - RNA, 59 nt, synthetic construct
  source 1..59: mol_type = other RNA
ggactacacccttaccgttgtgtaggggtctaaaactcctaaaattcccttagtcagag

SEQ ID NO: 116 - RNA, 60 nt, synthetic construct
  source 1..60: mol_type = other RNA
gttcagcatgaccgcttcttttacagcggactgaacctcctaaaattcccttagtcagag

SEQ ID NO: 117 - RNA, 53 nt, synthetic construct
  source 1..53: mol_type = other RNA
tcctaaaattcccttagtcagaggactgaaccttaccatgtagggaattgaac

SEQ ID NO: 118 - RNA, 59 nt, synthetic construct
  source 1..59: mol_type = other RNA
tcctaaaattcccttagtcagaggttgtagaagctcttattttgaagggtataacaact

SEQ ID NO: 119 - RNA, 52 nt, synthetic construct
  source 1..52: mol_type = other RNA
tcctaaaattcccttagtcagagatgccttaattttggaaggtgagaacaac

SEQ ID NO: 120 - RNA, 59 nt, synthetic construct
  source 1..59: mol_type = other RNA
tcctaaaattcccttagtcagaggttgtaactgcccttattttgaagggtataaacaac

SEQ ID NO: 121 - RNA, 59 nt, synthetic construct
  source 1..59: mol_type = other RNA
tcctaaaattcccttagtcagaggctgtagaagcctccgatttgtgaggtgatgacagc

SEQ ID NO: 122 - RNA, 61 nt, synthetic construct
  source 1..61: mol_type = other RNA
tcctaaaattcccttagtcagagtagttttattacccctacaaacagggttatattctaac

SEQ ID NO: 123 - RNA, 59 nt, synthetic construct
  source 1..59: mol_type = other RNA
tcctaaaattcccttagtcagaggttgtaactgcccttattttgatgggtaaaaacaac

SEQ ID NO: 124 - RNA, 46 nt, synthetic construct
  source 1..46: mol_type = other RNA
tcctaaaattcccttagtcagaggttgtgcttaccctacaaaatta

SEQ ID NO: 125 - RNA, 59 nt, synthetic construct
  source 1..59: mol_type = other RNA
tcctaaaattcccttagtcagaggttgttgaatgctgcattttgggtagcaattacaac

SEQ ID NO: 126 - RNA, 49 nt, synthetic construct
  source 1..49: mol_type = other RNA
tcctaaaattcccttagtcagagagtccccgctcgtttcggggtggtct

SEQ ID NO: 127 - RNA, 58 nt, synthetic construct
  source 1..58: mol_type = other RNA
tcctaaaattcccttagtcagaggttgtttttattcttcaaaataagagcagttacaa

SEQ ID NO: 128 - RNA, 59 nt, synthetic construct
  source 1..59: mol_type = other RNA
tcctaaaattcccttagtcagaggttgtctttaccctccaaaccaagagcattcacaac

SEQ ID NO: 129 - RNA, 59 nt, synthetic construct
  source 1..59: mol_type = other RNA
tcctaaaattcccttagtcagaggttgtgggtattctgcaaatttagggcaataacaaa

SEQ ID NO: 130 - RNA, 59 nt, synthetic construct
  source 1..59: mol_type = other RNA
tcctaaaattcccttagtcagagcgaattccgaattaacctcgtgtagtgacgtcgttc

SEQ ID NO: 131 - RNA, 59 nt, synthetic construct
  source 1..59: mol_type = other RNA
tcctaaaattcccttagtcagaggttgttttcaccttgcaaatataaggcatttacaac

SEQ ID NO: 132 - RNA, 59 nt, synthetic construct
  source 1..59: mol_type = other RNA
tcctaaaattcccttagtcagaggttgtaactgctcttgttttgaagggtaaacacaac

SEQ ID NO: 133 - RNA, 52 nt, synthetic construct
  source 1..52: mol_type = other RNA
tcctaaaattcccttagtcagagtgctctcagttttggagggtaaacacaac

SEQ ID NO: 134 - RNA, 52 nt, synthetic construct
  source 1..52: mol_type = other RNA
tcctaaaattcccttagtcagagatgccttaattttggaaggtgaaaacaac

SEQ ID NO: 135 - RNA, 59 nt, synthetic construct
  source 1..59: mol_type = other RNA
tcctaaaattcccttagtcagaggctgtacctaccctgcaaatcaggagcctctacagc

SEQ ID NO: 136 - RNA, 61 nt, synthetic construct
  source 1..61: mol_type = other RNA
tcctaaaattcccttagtcagagaagttgtcatacccctcccaacgaggggcttctacaac

SEQ ID NO: 137 - RNA, 59 nt, synthetic construct
  source 1..59: mol_type = other RNA
tcctaaaattcccttagtcagaggttgtagcaacctatattttgttaggaaaagacaac

SEQ ID NO: 138 - RNA, 59 nt, synthetic construct
  source 1..59: mol_type = other RNA
tcctaaaattcccttagtcagagggactacacccttaccgttgtgtaggggtctaaaac

SEQ ID NO: 139 - RNA, 60 nt, synthetic construct
  source 1..60: mol_type = other RNA
tcctaaaattcccttagtcagaggttcagcatgaccgcttcttttacagcggactgaacc

SEQ ID NO: 140 - RNA, 59 nt, synthetic construct; identical to SEQ ID NO: 109
  source 1..59: mol_type = other RNA

SEQ ID NO: 141 - RNA, 46 nt, synthetic construct
  source 1..46: mol_type = other RNA
ttcaaaataagggcagttacaactcctaaaattcccttagtcagag

SEQ ID NO: 142 - RNA, 59 nt, synthetic construct
  source 1..59: mol_type = other RNA
gtctaagactaggtaagaattagcggtgtccattgctcctaaaattcccttagtcagag

SEQ ID NO: 143 - RNA, 59 nt, synthetic construct
  source 1..59: mol_type = other RNA
gctggagcagccctcgatttgcagggtaatcacagctcctaaaattcccttagtcagag

SEQ ID NO: 144 - RNA, 59 nt, synthetic construct; identical to SEQ ID NO: 97
  source 1..59: mol_type = other RNA

SEQ ID NO: 145 - RNA, 59 nt, synthetic construct
  source 1..59: mol_type = other RNA
gttgtgtgtaacctaaaaaatgagggcaataacaactcctaaaattcccttagtcagag

SEQ ID NO: 146 - RNA, 59 nt, synthetic construct; identical to SEQ ID NO: 98
  source 1..59: mol_type = other RNA

SEQ ID NO: 147 - RNA, 59 nt, synthetic construct; identical to SEQ ID NO: 100
  source 1..59: mol_type = other RNA

SEQ ID NO: 148 - RNA, 59 nt, synthetic construct; identical to SEQ ID NO: 143
  source 1..59: mol_type = other RNA

SEQ ID NO: 149 - RNA, 58 nt, synthetic construct
  source 1..58: mol_type = other RNA
gttgttctcaccttgcaaataataaggcatatacatcctaaaattcccttagtcagag

SEQ ID NO: 150 - RNA, 59 nt, synthetic construct
  source 1..59: mol_type = other RNA
ggtgtacctgccatgcaaatagatggctttcacacctcctaaaattcccttagtcagag

SEQ ID NO: 151 - RNA, 59 nt, synthetic construct
  source 1..59: mol_type = other RNA
gctgtaatcaccccgcaaaaccagggttgcttcagctcctaaaattcccttagtcagag

SEQ ID NO: 152 - RNA, 59 nt, synthetic construct
  source 1..59: mol_type = other RNA
gttgtctttactccacaaactaagagcattcacaactcctaaaattcccttagtcagag

SEQ ID NO: 153 - RNA, 59 nt, synthetic construct
  source 1..59: mol_type = other RNA
ggtgttttaatctttccaactaaagacttttacacctcctaaaattcccttagtcagag

SEQ ID NO: 154 - RNA, 49 nt, synthetic construct
  source 1..49: mol_type = other RNA
ccttctttttgaaaggcacaaatacctcctaaaattcccttagtcagag

SEQ ID NO: 155 - RNA, 59 nt, synthetic construct; identical to SEQ ID NO: 108
  source 1..59: mol_type = other RNA

SEQ ID NO: 156 - RNA, 53 nt, synthetic construct
  source 1..53: mol_type = other RNA
gttgtttttacccttcagaataagagcagttcctaaaattcccttagtcagag

SEQ ID NO: 157 - RNA, 61 nt, synthetic construct
  source 1..61: mol_type = other RNA
acgttgtcatacccctcctaacgaggggcttctacaactcctaaaattcccttagtcagag

SEQ ID NO: 158 - RNA, 59 nt, synthetic construct
  source 1..59: mol_type = other RNA
gttgtgaatgccatatttttgaaaggtagaaacaactcctaaaattcccttagtcagag

SEQ ID NO: 159 - RNA, 59 nt, synthetic construct; identical to SEQ ID NO: 114
  source 1..59: mol_type = other RNA

SEQ ID NO: 160 - RNA, 59 nt, synthetic construct; identical to SEQ ID NO: 102
  source 1..59: mol_type = other RNA

SEQ ID NO: 161 - RNA, 59 nt, synthetic construct; identical to SEQ ID NO: 112
  source 1..59: mol_type = other RNA

SEQ ID NO: 162 - RNA, 61 nt, synthetic construct; identical to SEQ ID NO: 99
  source 1..61: mol_type = other RNA

SEQ ID NO: 163 - RNA, 52 nt, synthetic construct; identical to SEQ ID NO: 110
  source 1..52: mol_type = other RNA

SEQ ID NO: 164 - RNA, 59 nt, synthetic construct; identical to SEQ ID NO: 132
  source 1..59: mol_type = other RNA

SEQ ID NO: 165 - RNA, 46 nt, synthetic construct
  source 1..46: mol_type = other RNA
tcctaaaattcccttagtcagagttcaaaataagggcagttacaac

SEQ ID NO: 166 - RNA, 59 nt, synthetic construct
  source 1..59: mol_type = other RNA
tcctaaaattcccttagtcagaggtctaagactaggtaagaattagcggtgtccattgc

SEQ ID NO: 167 - RNA, 59 nt, synthetic construct
  source 1..59: mol_type = other RNA
tcctaaaattcccttagtcagaggctggagcagccctcgatttgcagggtaatcacagc

SEQ ID NO: 168 - RNA, 59 nt, synthetic construct; identical to SEQ ID NO: 120
  source 1..59: mol_type = other RNA

SEQ ID NO: 169 - RNA, 59 nt, synthetic construct
  source 1..59: mol_type = other RNA
tcctaaaattcccttagtcagaggttgtgtgtaacctaaaaaatgagggcaataacaac

SEQ ID NO: 170 - RNA, 59 nt, synthetic construct; identical to SEQ ID NO: 121
  source 1..59: mol_type = other RNA

SEQ ID NO: 171 - RNA, 59 nt, synthetic construct; identical to SEQ ID NO: 123
  source 1..59: mol_type = other RNA

SEQ ID NO: 172 - RNA, 59 nt, synthetic construct; identical to SEQ ID NO: 167
  source 1..59: mol_type = other RNA

SEQ ID NO: 173 - RNA, 58 nt, synthetic construct
  source 1..58: mol_type = other RNA
tcctaaaattcccttagtcagaggttgttctcaccttgcaaataataaggcatataca

SEQ ID NO: 174 - RNA, 59 nt, synthetic construct
  source 1..59: mol_type = other RNA
tcctaaaattcccttagtcagagggtgtacctgccatgcaaatagatggctttcacacc

SEQ ID NO: 175 - RNA, 59 nt, synthetic construct
  source 1..59: mol_type = other RNA
tcctaaaattcccttagtcagaggctgtaatcaccccgcaaaaccagggttgcttcagc

SEQ ID NO: 176 - RNA, 59 nt, synthetic construct
  source 1..59: mol_type = other RNA
tcctaaaattcccttagtcagaggttgtctttactccacaaactaagagcattcacaac

SEQ ID NO: 177 - RNA, 59 nt, synthetic construct
  source 1..59: mol_type = other RNA
tcctaaaattcccttagtcagagggtgttttaatctttccaactaaagacttttacacc

SEQ ID NO: 178 - RNA, 49 nt, synthetic construct
  source 1..49: mol_type = other RNA
tcctaaaattcccttagtcagagccttctttttgaaaggcacaaatacc

SEQ ID NO: 179 - RNA, 59 nt, synthetic construct; identical to SEQ ID NO: 131
  source 1..59: mol_type = other RNA

SEQ ID NO: 180 - RNA, 53 nt, synthetic construct
  source 1..53: mol_type = other RNA
tcctaaaattcccttagtcagaggttgtttttacccttcagaataagagcagt

SEQ ID NO: 181 - RNA, 61 nt, synthetic construct
  source 1..61: mol_type = other RNA
tcctaaaattcccttagtcagagacgttgtcatacccctcctaacgaggggcttctacaac

SEQ ID NO: 182 - RNA, 59 nt, synthetic construct
  source 1..59: mol_type = other RNA
tcctaaaattcccttagtcagaggttgtgaatgccatatttttgaaaggtagaaacaac

SEQ ID NO: 183 - RNA, 59 nt, synthetic construct; identical to SEQ ID NO: 137
  source 1..59: mol_type = other RNA

SEQ ID NO: 184 - RNA, 59 nt, synthetic construct; identical to SEQ ID NO: 125
  source 1..59: mol_type = other RNA

SEQ ID NO: 185 - RNA, 59 nt, synthetic construct; identical to SEQ ID NO: 135
  source 1..59: mol_type = other RNA

SEQ ID NO: 186 - RNA, 61 nt, synthetic construct; identical to SEQ ID NO: 122
  source 1..61: mol_type = other RNA

SEQ ID NO: 187 - RNA, 52 nt, synthetic construct; identical to SEQ ID NO: 133
  source 1..52: mol_type = other RNA

SEQ ID NO: 188 - RNA, 59 nt, synthetic construct
  source 1..59: mol_type = other RNA
gtcatagaccccttcaatttatgaggggttttgttctcctaaaattcccttagtcagag

SEQ ID NO: 189 - RNA, 59 nt, synthetic construct
  source 1..59: mol_type = other RNA
gttgtggaagccctcattttgagagggtattacaactcctaaaattcccttagtcagag

SEQ ID NO: 190 - RNA, 59 nt, synthetic construct
  source 1..59: mol_type = other RNA
gttgtgcttacccttaaaactaagggcagctacaactcctaaaattcccttagtcagag

SEQ ID NO: 191 - RNA, 59 nt, synthetic construct
  source 1..59: mol_type = other RNA
gttgtaagtgacctcattttggaaggtaaaaacaactcctaaaattcccttagtcagag

SEQ ID NO: 192 - RNA, 59 nt, synthetic construct
  source 1..59: mol_type = other RNA
gttgtgtatatctcccaaatcagagacagctacaactcctaaaattcccttagtcagag

SEQ ID NO: 193 - RNA, 59 nt, synthetic construct
  source 1..59: mol_type = other RNA
gttgtttataccttacaaaataaaggctctcacaactcctaaaattcccttagtcagag

SEQ ID NO: 194 - RNA, 59 nt, synthetic construct
  source 1..59: mol_type = other RNA
cctttggagtactgttatttaacagggttctaaaactcctaaaattcccttagtcagag

SEQ ID NO: 195 - RNA, 59 nt, synthetic construct
  source 1..59: mol_type = other RNA
gttgtcgaaagccttattttgaagggctattacaactcctaaaattcccttagtcagag

SEQ ID NO: 196 - RNA, 54 nt, synthetic construct
  source 1..54: mol_type = other RNA
atgactataccagcaatggctggattaaaactcctaaaattcccttagtcagag

SEQ ID NO: 197 - RNA, 59 nt, synthetic construct
  source 1..59: mol_type = other RNA
gctgtagaggcccccgttttagggggtaggtacagctcctaaaattcccttagtcagag

SEQ ID NO: 198 - RNA, 59 nt, synthetic construct
  source 1..59: mol_type = other RNA
gctgttactgccccacaaatcgaggcctatcacagctcctaaaattcccttagtcagag

SEQ ID NO: 199 - RNA, 43 nt, synthetic construct
  source 1..43: mol_type = other RNA
gctgtagaggcccccgattttcctaaaattcccttagtcagag

SEQ ID NO: 200 - RNA, 58 nt, synthetic construct
  source 1..58: mol_type = other RNA
gttgtgcctacctctcaaatatagggctttcacaatcctaaaattcccttagtcagag

SEQ ID NO: 201 - RNA, 43 nt, synthetic construct
  source 1..43: mol_type = other RNA
gttgtaaataccctacaaattcctaaaattcccttagtcagag

SEQ ID NO: 202 - RNA, 59 nt, synthetic construct
  source 1..59: mol_type = other RNA
gaactatagtagtgtaaatttacactactctaaaactcctaaaattcccttagtcagag

SEQ ID NO: 203 - RNA, 59 nt, synthetic construct
  source 1..59: mol_type = other RNA
gctgttatatccttacctttgtaagggaagtacagctcctaaaattcccttagtcagag

SEQ ID NO: 204 - RNA, 59 nt, synthetic construct
  source 1..59: mol_type = other RNA
gttgtagttcccttttatttagggatggtgttcagctcctaaaattcccttagtcagag

SEQ ID NO: 205 - RNA, 59 nt, synthetic construct
  source 1..59: mol_type = other RNA
gttgtaaaatctctcgttttggagaggattaacaactcctaaaattcccttagtcagag

SEQ ID NO: 206 - RNA, 53 nt, synthetic construct
  source 1..53: mol_type = other RNA
gttgtagaagcctgtcgtttggatgggtattcctaaaattcccttagtcagag

SEQ ID NO: 207 - RNA, 60 nt, synthetic construct
  source 1..60: mol_type = other RNA
gttgtcatacctacccaaacgataggcttctacaacttcctaaaattcccttagtcagag

SEQ ID NO: 208 - RNA, 59 nt, synthetic construct
  source 1..59: mol_type = other RNA
cttatacaacacccattttcacagtgggtctataactcctaaaattcccttagtcagag

SEQ ID NO: 209 - RNA, 59 nt, synthetic construct
  source 1..59: mol_type = other RNA
gttgtcataccgctccgaatgaacggcttctacaactcctaaaattcccttagtcagag

SEQ ID NO: 210 - RNA, 59 nt, synthetic construct
  source 1..59: mol_type = other RNA
gttgtcataccgccccgaatgagcggcttctacaattcctaaaattcccttagtcagag

SEQ ID NO: 211 - RNA, 59 nt, synthetic construct
  source 1..59: mol_type = other RNA
gctgtcattaccctccaaaacgagggcttctacagctcctaaaattcccttagtcagag

SEQ ID NO: 212 - RNA, 59 nt, synthetic construct
  source 1..59: mol_type = other RNA
gtttcagaaccccgtaattctacggggttgtagttgtcctaaaattcccttagtcagag

SEQ ID NO: 213 - RNA, 60 nt, synthetic construct
  source 1..60: mol_type = other RNA
gttttagacccctgtgattcaggggtgtagtgaaacttcctaaaattcccttagtcagag

SEQ ID NO: 214 - RNA, 59 nt, synthetic construct
  source 1..59: mol_type = other RNA
gttttaagactgtgcaaattcgcatagctttcaatctcctaaaattcccttagtcagag

SEQ ID NO: 215 - RNA, 59 nt, synthetic construct
  source 1..59: mol_type = other RNA
gttgtagaagcctgtcgtttggatgggtataacaactcctaaaattcccttagtcagag

SEQ ID NO: 216 - RNA, 59 nt, synthetic construct
  source 1..59: mol_type = other RNA
gttgtcatacccactcaaattgtgggcttctacaactcctaaaattcccttagtcagag

SEQ ID NO: 217 - RNA, 58 nt, synthetic construct
  source 1..58: mol_type = other RNA
gtttccatacccactcaaatgcgggcttctgaaactcctaaaattcccttagtcagag

SEQ ID NO: 218 - RNA, 59 nt, synthetic construct
  source 1..59: mol_type = other RNA
gttgtgtgtgcctttcaaattgaaggcgttcccaactcctaaaattcccttagtcagag

SEQ ID NO: 219 - RNA, 59 nt, synthetic construct
  source 1..59: mol_type = other RNA
gctgtacttaccatacaaatttatggcttttacagctcctaaaattcccttagtcagag

SEQ ID NO: 220 - RNA, 59 nt, synthetic construct
  source 1..59: mol_type = other RNA
gtgcgagaccatccccaaatgaaggggaactacacctcctaaaattcccttagtcagag

SEQ ID NO: 221 - RNA, 59 nt, synthetic construct
  source 1..59: mol_type = other RNA
ggtgtagttcccatttagttggggatgttctcccgctcctaaaattcccttagtcagag

SEQ ID NO: 222 - RNA, 59 nt, synthetic construct
  source 1..59: mol_type = other RNA
ggtgcagttccccttcatttggggatggtgttgagctcctaaaattcccttagtcagag

SEQ ID NO: 223 - RNA, 61 nt, synthetic construct
  source 1..61: mol_type = other RNA
tgctgtaacagccctgattttgcagggtaaatacagtctcctaaaattcccttagtcagag

SEQ ID NO: 224 - RNA, 44 nt, synthetic construct
  source 1..44: mol_type = other RNA
caaaatggagacttcatcagctcctaaaattcccttagtcagag

SEQ ID NO: 225 - RNA, 50 nt, synthetic construct
  source 1..50: mol_type = other RNA
acctctcaaaatgaggccttcaacaactcctaaaattcccttagtcagag

SEQ ID NO: 226 - RNA, 59 nt, synthetic construct
  source 1..59: mol_type = other RNA
gttgtagaagcttatcgtttggataggtatgacaactcctaaaattcccttagtcagag

SEQ ID NO: 227 - RNA, 53 nt, synthetic construct
  source 1..53: mol_type = other RNA
aagactggtatatgaaccagggagacaacatcctaaaattcccttagtcagag

SEQ ID NO: 228 - RNA, 59 nt, synthetic construct
  source 1..59: mol_type = other RNA
gttgtcatgccgatcctaacgacaggcttctacaactcctaaaattcccttagtcagag

SEQ ID NO: 229 - RNA, 59 nt, synthetic construct
  source 1..59: mol_type = other RNA
gttgtaaagacctgcactttagtaggaagaaacaactcctaaaattcccttagtcagag

SEQ ID NO: 230 - RNA, 59 nt, synthetic construct
  source 1..59: mol_type = other RNA
gttgtagaagccgttcattcggagcggtatgacaactcctaaaattcccttagtcagag

SEQ ID NO: 231 - RNA, 54 nt, synthetic construct
  source 1..54: mol_type = other RNA
gtactacacccattttgcatgggtctaaaactcctaaaattcccttagtcagag

SEQ ID NO: 232 - RNA, 59 nt, synthetic construct
  source 1..59: mol_type = other RNA
gttgtcttttcctaacaaaatataggttgctacaactcctaaaattcccttagtcagag

SEQ ID NO: 233 - RNA, 59 nt, synthetic construct
  source 1..59: mol_type = other RNA
gttgtagaagccgctcattcggggcggtatgacaactcctaaaattcccttagtcagag

SEQ ID NO: 234 - RNA, 59 nt, synthetic construct
  source 1..59: mol_type = other RNA
tcctaaaattcccttagtcagaggtcatagaccccttcaatttatgaggggttttgttc

SEQ ID NO: 235 - RNA, 59 nt, synthetic construct
  source 1..59: mol_type = other RNA
tcctaaaattcccttagtcagaggttgtggaagccctcattttgagagggtattacaac

SEQ ID NO: 236 - RNA, 59 nt, synthetic construct
  source 1..59: mol_type = other RNA
tcctaaaattcccttagtcagaggttgtgcttacccttaaaactaagggcagctacaac

SEQ ID NO: 237 - RNA, 59 nt, synthetic construct
  source 1..59: mol_type = other RNA
tcctaaaattcccttagtcagaggttgtaagtgacctcattttggaaggtaaaaacaac

SEQ ID NO: 238 - RNA, 59 nt, synthetic construct
  source 1..59: mol_type = other RNA
tcctaaaattcccttagtcagaggttgtgtatatctcccaaatcagagacagctacaac

SEQ ID NO: 239 - RNA, 59 nt, synthetic construct
  source 1..59: mol_type = other RNA
tcctaaaattcccttagtcagaggttgtttataccttacaaaataaaggctctcacaac

SEQ ID NO: 240 - RNA, 59 nt, synthetic construct
  source 1..59: mol_type = other RNA
tcctaaaattcccttagtcagagcctttggagtactgttatttaacagggttctaaaac

SEQ ID NO: 241 - RNA, 59 nt, synthetic construct
  source 1..59: mol_type = other RNA
tcctaaaattcccttagtcagaggttgtcgaaagccttattttgaagggctattacaac

SEQ ID NO: 242 - RNA, 54 nt, synthetic construct
  source 1..54: mol_type = other RNA
tcctaaaattcccttagtcagagatgactataccagcaatggctggattaaaac

SEQ ID NO: 243 - RNA, 59 nt, synthetic construct
  source 1..59: mol_type = other RNA
tcctaaaattcccttagtcagaggctgtagaggcccccgttttagggggtaggtacagc

SEQ ID NO: 244 - RNA, 59 nt, synthetic construct
  source 1..59: mol_type = other RNA
tcctaaaattcccttagtcagaggctgttactgccccacaaatcgaggcctatcacagc

SEQ ID NO: 245 - RNA, 43 nt, synthetic construct
  source 1..43: mol_type = other RNA
tcctaaaattcccttagtcagaggctgtagaggcccccgattt

SEQ ID NO: 246 - RNA, 58 nt, synthetic construct
  source 1..58: mol_type = other RNA
tcctaaaattcccttagtcagaggttgtgcctacctctcaaatatagggctttcacaa

SEQ ID NO: 247 - RNA, 43 nt, synthetic construct
  source 1..43: mol_type = other RNA
tcctaaaattcccttagtcagaggttgtaaataccctacaaat

SEQ ID NO: 248 - RNA, 59 nt, synthetic construct
  source 1..59: mol_type = other RNA
tcctaaaattcccttagtcagaggaactatagtagtgtaaatttacactactctaaaac

SEQ ID NO: 249 - RNA, 59 nt, synthetic construct
  source 1..59: mol_type = other RNA
tcctaaaattcccttagtcagaggctgttatatccttacctttgtaagggaagtacagc

SEQ ID NO: 250 - RNA, 59 nt, synthetic construct
  source 1..59: mol_type = other RNA
tcctaaaattcccttagtcagaggttgtagttcccttttatttagggatggtgttcagc

SEQ ID NO: 251 - RNA, 59 nt, synthetic construct
  source 1..59: mol_type = other RNA
tcctaaaattcccttagtcagaggttgtaaaatctctcgttttggagaggattaacaac

SEQ ID NO: 252 - RNA, 53 nt, synthetic construct
  source 1..53: mol_type = other RNA
tcctaaaattcccttagtcagaggttgtagaagcctgtcgtttggatgggtat

SEQ ID NO: 253 - RNA, 60 nt, synthetic construct
  source 1..60: mol_type = other RNA
tcctaaaattcccttagtcagaggttgtcatacctacccaaacgataggcttctacaact

SEQ ID NO: 254 - RNA, 59 nt, synthetic construct
  source 1..59: mol_type = other RNA
tcctaaaattcccttagtcagagcttatacaacacccattttcacagtgggtctataac

SEQ ID NO: 255 - RNA, 59 nt, synthetic construct
  source 1..59: mol_type = other RNA
tcctaaaattcccttagtcagaggttgtcataccgctccgaatgaacggcttctacaac

SEQ ID NO: 256 - RNA, 59 nt, synthetic construct
  source 1..59: mol_type = other RNA
tcctaaaattcccttagtcagaggttgtcataccgccccgaatgagcggcttctacaat

SEQ ID NO: 257 - RNA, 59 nt, synthetic construct
  source 1..59: mol_type = other RNA
tcctaaaattcccttagtcagaggctgtcattaccctccaaaacgagggcttctacagc

SEQ ID NO: 258 - RNA, 59 nt, synthetic construct
  source 1..59: mol_type = other RNA
tcctaaaattcccttagtcagaggtttcagaaccccgtaattctacggggttgtagttg

SEQ ID NO: 259 - RNA, 60 nt, synthetic construct
  source 1..60: mol_type = other RNA
tcctaaaattcccttagtcagaggttttagacccctgtgattcaggggtgtagtgaaact

SEQ ID NO: 260 - RNA, 59 nt, synthetic construct
  source 1..59: mol_type = other RNA
tcctaaaattcccttagtcagaggttttaagactgtgcaaattcgcatagctttcaatc

SEQ ID NO: 261 - RNA, 59 nt, synthetic construct
  source 1..59: mol_type = other RNA
tcctaaaattcccttagtcagaggttgtagaagcctgtcgtttggatgggtataacaac

SEQ ID NO: 262 - RNA, 59 nt, synthetic construct
  source 1..59: mol_type = other RNA
tcctaaaattcccttagtcagaggttgtcatacccactcaaattgtgggcttctacaac

SEQ ID NO: 263 - RNA, 58 nt, synthetic construct
  source 1..58: mol_type = other RNA
tcctaaaattcccttagtcagaggtttccatacccactcaaatgcgggcttctgaaac

SEQ ID NO: 264 - RNA, 59 nt, synthetic construct
  source 1..59: mol_type = other RNA
tcctaaaattcccttagtcagaggttgtgtgtgcctttcaaattgaaggcgttcccaac

SEQ ID NO: 265 - RNA, 59 nt, synthetic construct
  source 1..59: mol_type = other RNA
tcctaaaattcccttagtcagaggctgtacttaccatacaaatttatggcttttacagc

SEQ ID NO: 266 - RNA, 59 nt, synthetic construct
  source 1..59: mol_type = other RNA
tcctaaaattcccttagtcagaggtgcgagaccatccccaaatgaaggggaactacacc

SEQ ID NO: 267 - RNA, 59 nt, synthetic construct
  source 1..59: mol_type = other RNA
tcctaaaattcccttagtcagagggtgtagttcccatttagttggggatgttctcccgc

SEQ ID NO: 268 - RNA, 59 nt, synthetic construct
  source 1..59: mol_type = other RNA
tcctaaaattcccttagtcagagggtgcagttccccttcatttggggatggtgttgagc

SEQ ID NO: 269 - RNA, 61 nt, synthetic construct
  source 1..61: mol_type = other RNA
tcctaaaattcccttagtcagagtgctgtaacagccctgattttgcagggtaaatacagtc

SEQ ID NO: 270 - RNA, 44 nt, synthetic construct
  source 1..44: mol_type = other RNA
tcctaaaattcccttagtcagagcaaaatggagacttcatcagc

SEQ ID NO: 271 - RNA, 50 nt, synthetic construct
  source 1..50: mol_type = other RNA
tcctaaaattcccttagtcagagacctctcaaaatgaggccttcaacaac

SEQ ID NO: 272 - RNA, 59 nt, synthetic construct
  source 1..59: mol_type = other RNA
tcctaaaattcccttagtcagaggttgtagaagcttatcgtttggataggtatgacaac

SEQ ID NO: 273 - RNA, 53 nt, synthetic construct
  source 1..53: mol_type = other RNA
tcctaaaattcccttagtcagagaagactggtatatgaaccagggagacaaca

SEQ ID NO: 274 - RNA, 59 nt, synthetic construct
  source 1..59: mol_type = other RNA
tcctaaaattcccttagtcagaggttgtcatgccgatcctaacgacaggcttctacaac

SEQ ID NO: 275 - RNA, 59 nt, synthetic construct
  source 1..59: mol_type = other RNA
tcctaaaattcccttagtcagaggttgtaaagacctgcactttagtaggaagaaacaac

SEQ ID NO: 276 - RNA, 59 nt, synthetic construct
  source 1..59: mol_type = other RNA
tcctaaaattcccttagtcagaggttgtagaagccgttcattcggagcggtatgacaac

SEQ ID NO: 277 - RNA, 54 nt, synthetic construct
  source 1..54: mol_type = other RNA
tcctaaaattcccttagtcagaggtactacacccattttgcatgggtctaaaac

SEQ ID NO: 278 - RNA, 59 nt, synthetic construct
  source 1..59: mol_type = other RNA
tcctaaaattcccttagtcagaggttgtcttttcctaacaaaatataggttgctacaac

SEQ ID NO: 279 - RNA, 59 nt, synthetic construct
  source 1..59: mol_type = other RNA
tcctaaaattcccttagtcagaggttgtagaagccgctcattcggggcggtatgacaac

SEQ ID NO: 280 - DNA, 3750 bp, synthetic construct
  source 1..3750: mol_type = other DNA
atgaatcagtacatacacgctgataaaaaagaaaataaaaaacgccccaacaaaagcagcattattcgtatcatggtatcggattttgacgatgaatacattcaggaaatcaaggtgctgtacaccaaacaaggtggcgtcgatacgttcaaaataaacaaaatgagctatgacagcgccagtcagaaaattatttttgaagaagtagcaacacaaaacatgttatcggtggaagattcaaatctgaattttaaacgtccaatggttgagtgcaaaaatggcgatatctacgtcgttaaaccgtcggggaaagtaaacgcaaaaggacaggcaattgaacctctgagatcttataagatacatgggaaatacctggatctgacagaggcaattgggaaagacaacgctgaattgagtggcaaaaagcagatctatcttcatgttgaggatcttttaggtatgcacaccactgccgattccattgatcgtcgtagactcgaatcagagacccagagaaccctgttatcaaaagaagtgatggaaaactatgctctgattatgggccacgagataaagctcaatgaatccgatgaaacctataaactggcctgtagtaaagaaatctacaaggccaatcggttcttagactatcgctcacgcctgctctattactatagctttattaatcattttctggcgggactgtcaaaaggggcgacttatgagtacgcgggaaaatctttggtaacggagattccggacggtgaggtgtggcaattatgtgaattagaggtgacggcgtaccatgggatatacattaacaaaaaaacaaatgagcttgttaacgaaaattgtctcgaaatagacgcgatctatgcccagatggcaaaaaacatgagaaaaacgttaaacgagttcgtcgaaaattataacgcgatgatagaaaagcaaaacgagcttaataaaaacaaaccgcagatgaaaaaagcgattgtgcaggaaccgattaagttcgaaaactttacagaagagaaaatcaatcaggacttgcacaatattgtgtatatcctgtccgatctgcgtcacaaactgatgcactttgagtaccgttattttgatcttctgatgacgggtaaaaaaatgggcgaaaaaagtgaagtggaagtaagtgtccctgatcggaatagtgagttaccggcttcaaagaatcaaccatctaaggataagttccggaaaggaaagaaactttcagagctcttaaaccttaatattctgaaagaactcgacacatttgtaaaagtcaaagaatcgtatcagaccacttatcttgagacaaatgacaaaatagaaatcctgggtaagttaaaaactgccaaatctatctatcagatctatcatcaaatttgtcagcgcaaaaacggtttcaacaaattcatcaattccttctttattgtggatggtgaagaaaatacagaggttaaagactgcataaacgaggtttttcgcaaggaaattcactatttcgaaacggaaatagccaaatccaataaagacacactggatgacaagtataagaataaaaatcaatcccagaaaactcgtgaccgtatggaagatcagatagaggagtgcaaacgttatcaggacgatgaatccaatatagatacttgggttgcttaccataaggatattcattatagcaagcggtacaagaaactgtacagtaaacataaaacgcttgtaggcaatctgaacagcgctgtttccaagggtttagacggtcaggttattaagaaaatcaatgacgacattgcaattataaagcgcgaaatgaatgaaattaccaaagccaattcaaaatctcggttgcgctataagatgcaaatggcctatggctttctctttgttgagtatggtctcaaaattccgaaatttttaaacgattttgatctgagccatgagcgcacagcgtcaaaaataaaaggatatacctcgccagaaaaagtgacccaatatctgaccaatggtgaaggaaataaagacaattttaatttggatgaactgacgaagaactttaagaagcagatgaagttcgagttcctgaaactgaacgaagataataacttgatcaaactctacattttgatctatcagcttttgccacgagaattaaaaggtgactttctgggttttgttaaaagcaattattacgatcttaagcacgtggattttcaaacacgagaaaccgaagcaaaagatcaatttttccacaacatgcgcctgtttgaaaaaaacgtgaaagcatttgacttgatccaatattcaataggggatgaaatgtctcaattgggcaatgagacctttaatttttcacaggcgctgtcaaaaatagtatccgacgataccatccttaatagtgctaccgagattcccaacatcaattgtctggtttatgggagcttattaaaatactacgagaatgcttttcgtctgtctagtgaaatcgaaattcgcgccttaataaaaattgcacgaaaagagaaagaggtggttgatcattccaatagctactcgattaacaaggcacatagcaaaattgaaaaagaattaaaagagcgtgatagagataaggaagtctcattcttttgcatcctcgagtacgcccataaaaattctcttaatcaaaaaggcgactatactgattctgagatctatgataaagcttccaacttacgaaataagattgcccattgcgattatagaaacctgttcattacaaatattatttgtgaagcggaaaacattaacgtgaaggtaaaatatctgattgacgtaagcaacacaatcggccttaacactgtcgatcttggcaatgatatggtgaacgattacttgatgtcttatgataaacagatgacgtatctcgttaaaacctctgaagagcttctgaaagaaagccgtttggataaaagcaaagaaaaaaaagaacgccgcgacaatcttaaaaatgaaacgagaagtcattcagaaatctacatggaatatgaatggattagtgattacctcgtgaagttgaaagacaatcacgagatcttattgaaaaaaaataagactgaggatctgaaactgaatcgagcgtatgaactgataaaaaactataatgtcgctctgaataataagtcgaagattaagataagtgagctgacggcagaccatatcaataacaattgggtgaacatctggggagtactgaaccatgaactgcaggaaattaacggcctttatttgtataaggtcactcctaaaatcaaaaaagggatctaccttgttttaaccgataaaaagaattactgcctgaatattaacttctatacgcttaagaaagtccctagtaaagatgattctgaaatgactgaagagcgttatctgcgtgatattagtgaaaagtattattttaccgttggtgaagatagtatgaaagcattaaaagatcggttgcagactatcaatgataagtgcattgttaactatgtcaacaaaattgactgtaagaatgaaaatctcaaaggaaagtcggaattcaaagtaatcgacgtttataattcttgggataaaaaatatctgagcatttcaaatgaagagtcgcagcattggtctgttgagacaaaacgggataagaaatacaaagaaaacctgatattaaacctgatggagaagtcctcttttaagcttaatctgcatcagctgtaa

SEQ ID NO: 281 - DNA, 3141 bp, synthetic construct
  source 1..3141: mol_type = other DNA
atggcgcataatccgacatatttgtatgccgcgtatttgaatatggcacgtcataatgcctatcttaccctgtcctacatcagcgttgctattggcggaaaagaaggcgcagaggataaactgctcaatatggaagctctgaatattctcaaaaagccaaaagcagaacctgaaaaattaaagaaaacagaagaactgttgaccaaacatttccgtttccttctcccgatgacggataatgataaaagtgccggttatcatgaaattttaaccactgcattcaaattgctcaattctctgcggaacgaatatacgcactatcagcatgaagcaagcgattttgatgaacagttcatgaaaaatatgaaaaactgctttgatggggcaaaacggacggttaaggaacgtttcaatcttgaagacaacgatttgaagcacctggaccggtttagacaaaaagcgaatgatggtaaaaaaggcaaacgtgaatatgaggaaaatccaacttttcactataagtttgatgatgagaatggcagactgaccgaaaaaggcttggcgttttttatttgtctgtttctcgaaaagaagtacgctacactcttccttactcaactgtccggtttcaaaaaaggcgataccaaaggcaccaaagcgaccaaagaagtttactcgatctaccggatacagctgcccaaattaagaatcgacagcaaaaaaccggaaatggctcttggtattgatatgttgaacgagctgaaaaaatgtcccgccgagctgtacgatgtattaagtacggaagaccagaaacgctttcgcattattcccgatgaagaaccggacacgatggacgatacggaagacggcgaaattctgctgaaacgacacaaaaaccgttttccatacatggcattgagatacattgaccaaaacgagctttttccaaatattcgttttcaggtagctctgggaacttatcgccatcatttttacaacaaactgggggttgataatatccagcgggtgcgcatcctgcaaaaacaactgaaaggtttcggacgtcttgacgagatagaggaaaagcgaaagaccgtatgggcagacaaaattcgcccttttgaaaaaattgagaaagactctgccgaacaagagccttatatcacagacagttacgccaaatatattatttcaaacaacaaaatcggtctgaaatggttcgacagacaaaatgattattatcttcccgagttaaacgaaaaaggggcgaaaaatgaagcgcccacatgttggttatccatctatgaacttccggcgttactgtttcacagcatcctttgcaatcatagttctgacacccagaatattatacgtgattatgtatcgaagggataccgaaaactgtttaaagaggtagcatccggtgcgctgcagcccgcctcaaaagaaaaaatcgtcaaccaacttaaaacagcctataatcttgattttacccgcataccgaaagaattgcaggattatctcaccggaaagccggttaaaatggatgaccagctgaataaactgtgttcggaacgtattgctcagatggtcagcgattcacagaagcgacttgagcgcatagataacgatctgaaaactatcaaggatagaaagagcaacaaggtcgggaagaaacgatttgtagagattaaaagtggtgtcttagccgattttctggccgaggatatgctggcatttcagtccagttcggacaacggcaaagataagttgacgggcatgaactatcagatattacaagctgcacttgcatatttcggtcagtacaaagaccagatgacagaaatctttgagaagtgcaagttgataaactcaccaatcgaacatccgtttctgaagaatgtgatggcaaaaaatgctaccaacattgtggatttctatatcgtttacttaaaggcgaaggaaatatatctggataagtgtctgcgggagaaacaatataagaacgattattttttacatgttgaccgccaaaaatggacggagcgcaatactgatttttacaaagtgttggcaaagagctatgcggagaaattgcctgttgaattgccgcgcggtctgtttaacgatgccattaaaaagctgttgacgaaaaagcacggtgataatccggtgattcgcgaagctctgtcaaaagagcggtgcaatacaactttcctgattcagacttatttcaaagctatctgtgaagacaccacacaggaatattatacattcaaccgcagttataagattttcaatttgctcaatgataactacgtcggaaataaacttcagcctgcctattatgctgttaatgaatttgagaaaagagtcaaaaacatagatgcggaaatagagaaattcgactctcagcaacacgataaacttcatcgtctgttacatcatttcaaagaaaatgaaaaaatactccgtttatacaaagtgcaggatatcttactgtttttgatggcaaaacgcatactcatcacggagatgggtgagaataatattgggaaataccagttaaaacagattatgccggatagcccaacggatattttatctgctcaaacatcattttcaatcactctgaccaaaaacggatgccagaagatcatcaaacaggagaaactgaaactgaaaaattttggcgatttccagcgttttgtgcgtgaccgtcgtatcgagactttatttccatatatgaaagcggatagtattgaccggcagatactggaagccgagctggatgcgtacgatgataagcgcgtgcatatttttgaactcatacatcagtttgaggagtctgtgttgacaaagaatccatccattttatcagggaaaacctacatcaatttcgccggtattttaaaagcatctcctgagattcagacagaaaaacgtcagcaaatgcaaattatccgcaatgccttctgccacaatacttatcctcaaaagattgaaaagaacattgaagacattgaaaagccggaagggaaaaccgatgttcctttttctttatgtgaaaagaaagaaataccggaaattgctgagtttctgacggaatcgcttgaagacttgatcattataaacgaacactaa

SEQ ID NO: 282 - DNA, 3030 bp, synthetic construct
  source 1..3030: mol_type = other DNA
atggatactcctaatttttctgagcgtatcccggtttctttacaaagccatccttattattttgcgcactatcttaacatggcccgccacaacgcctatgtgattctggagtatgtgaatagagagttaataaagccaggtaagaacctggacgaagacaacctgatccagagcacggtgctgaaagacggatattttgatcgtaaacctgacgagctctcacaccggaatcgcctgctggtccaacattttccttttttacgtgaggcagaaaatgaaggtgcacgcacgtgcaatccggttagctataaactgaaaaccgctttagcagcactgaaccagtggcgtaataatgcatcgcattatccgctcaaccagaatcacgagaaagactttgacctgcagccgtttttttcctttgccattgaggcctgcaaaaaaagaatgcgggaagtttttcagccagatgacttttatcttttggagaccaacgagaaacagttctacacgttacataatgaaaacggtttcacagaaaaagggctgtactgctttatttgtttcttccttgagaaaaagtatgcgtttcaattcctcgccggcattaaggggtttaaaaatacaacagataataagttccgcgctaccttagagacgtttaccgagcattgttgtcgattaccaaaacccaaacttgattcttcagatattaaacttgacatgctgggcgaactgtctcgttgtcccgcccctctgtttgatctgctggatatcgaagagcggaagaagttcatccgcgaacccgaagaagtaaaaccggacgaatccggtgatagagaagaagtgcagcaggtgttaatgaaacgttacgatgaccgcttcccgtattttgcgttacgatatttcgaggaaaaaaatctgctcaaagggatctcattccatattcacataggcagatggataaaaagtgaacatacgaaaaaaattatgggcgccgaacgtgatcgtcgtttgctgaaagatattcgtacatttggcgaactgaaagaattttctcctgaacacgctccggattattggctgcgcgacggcattactcctgatgatgtggatcaattttcaacgccgcagtatcgtattgttggaaatcgaattggaatcaaacttaattacaacggccataatagatggtcggttccggataaagagattaacgtaaaacctgatgctatcataagtacgtacgaatttctgaacttgtttctttacgagcatctttatcagaaaaaactgaccggcttaagtccggccgagttcattcaggattaccttgatcgctttaataatttcctctctgaattcaaagccggtcacatacgtccagttggagatttttcgttagagaaacgtcgagggcaaggggacgaacctgatcttactgcgcgtcgcaaaagtttgcagaaagaattagatcgatttgtcttaaaagggaaagaccttcctgacaagatccgcgaatatttgttaggctataaacagaagagtgagaagaaacaggcgaagtggatactcggtggtatgattaaagaaaccgtctattggcgtaataaagcagaacagtccccggaaaaaatgcgaagcggagatatggcccaacagctggctcgggatatcatttttttaacgccgccacacacagttaaggaacacaagcagaaattgaacagcttggagtatgatgtactgcagtatgcactggcctatttcagctcaaatcgcgagaaactttattctttctttaaagaacatcaactcactgtcaaaggggaccgcgcacatccatttctttataagattcggctggacgagtgtcaaggtatattagactttttcatcgtgtatatgcagcagaaagaaaaatggctggggtggctggaccgcaacttgaagtcaccacgtttgaacgaagaggagttctttaacacttactcatattttattaaaacagatactaagcgggcaattgagatggattatgaaagttgcccaaattatcttccgcgaggtatttttaatgaacctatagcaaaagctgtccaaaaagctggtgtgaagattaaagacgaagataatgcgagttatgcgttatccgtatatagcaacggcaagactcaacccttctacaataaggaacggtactataataaaggtatatttcgcatggaagaactgccggaaaagctgcagcccaaggaattgttaggtaaaatacagtggacaatcaagagtagcggtaaagatactgaagaatttcggtcgttacagaacctgaaaaaccgtattctgaacaccgagaaagaaattcgttatgttcaatccacagatagagcgctgtggattatggttgctgatctttttcccgaaaccttcgagctgagaccagatgatctggagtgtataggacatgatctttctgatgatcttttaagccgcccctatcagatgaaagagaaagtctacaattacacaattacagactatttgccgataaagcggtacggagaatttcgccgtttcttaaaagatagacgtctcgagaatctcttaacctactttgaagaaggcgtaccgctgcatcgggaagctctggtagcggagctcgaggcgtacgacctgcagagaaaaaatttgttggagatcatctatcggtttgagaagttagtattcgaccgccatcggcatgaactgactttctcaggtgagggcgaaaatcaatacgtgaatcactgggattacttggattttgttgcacgtaagtacggactgtcggcagaagtgaaagaactgaactccgaacgttttacggaactccgcaacaaaatgctgcataatcagattccataccagttatggatcaaagaagccatcgctgcgagagaagaaaataccgtctgcggtagaattatgggaatgatcggcgaaatctatgaacgcatgaccaccgaaatcgaaaaacaaatgcaagtttaa

SEQ ID NO: 283 - DNA, 3486 bp, synthetic construct
  source 1..3486: mol_type = other DNA
atggaaaatcagacacaaaaaggaaaaggtatctattactactataccaaaaatgaagacaaacactattttggctcctttctgaacctggcgaataataatatcgagcaaatcattgaagagttccggattcgtcttagtctgaaagatgaaaaaaacatcaaggaaattatcaacaactacttcactgataaaaagtcttacacggactgggaacgtggtataaacatattgaaagagtatcttccggttattgattatctcgacttggctattaccgataaagagttcgagaaaattgatcttaaacaaaaagagaccgcaaaacgcaaatactttcggacaaatttctcactgctgatcgatactatcattgatcttagaaatttttacacgcactattttcacaaacctatctcaatcaatcccgatgtagctaagtttttagacaaaaaccttttaaacgtgtgtctcgacatcaaaaaacaaaaaatgaaaaccgataaaaccaaacaggctttgaaagatggtctggataaagagctcaaaaagctgattgaattaaaaaaggcagagctgaaagagaagaagattaagacgtggaatattacggaaaacgttgaaggagctgtttacaacgatgcgttcaatcacatggtttataagaataacgcgggtgttacaatactgaaagactatcacaaaagcatattgcccgatgacaaaattgacagtgagttaaaactgaacttttcaatctccggactggtctttttactttctatgttcctgtcaaagaaagaaattgagcagttcaaatctaatctcgaaggctttaagggaaaggtcataggcgaaaatggggagtatgaaattagcaaattcaacaatagtcttaagtatatggcgacacattggattttttcatatctgactttcaaagggctcaaacagcgggtaaaaaacacgtttgacaaagaaaccttgttaatgcagatgattgatgaactgaacaaagtccctcacgaagtttatcaaacgctgagtaaagaacagcaaaatgagtttttagaagacattaacgaatatgtgcaggataatgaggaaaacaaaaagtcaatggagaattcgattgtcgtgcatccggttatcagaaaacgctatgatgataagttcaattattttgcgattcgtttcctggacgagtttgcaaattttcctactttaaagttttttgttacagcaggtaattttgtacacgataaaagagaaaaacagattcagggaagcatgcttacttctgatagaatgataaaggaaaaaatcaatgtgtttggcaaactgactgaaattgcaaagtacaaaagcgattattttagcaatgaaaatacacttgaaacttctgaatgggagttatttcctaacccgagctatctcctcatacaaaacaatattccggtgcatattgatcttattcataataccgaagaggcaaaacagtgccagattgcgattgaccgaataaaatgtacgacgaatccggctaagaagcgcaatactcgcaaatccaaagaggagataataaagattatctaccagaagaacaagaatatcaaatatggcgacccgacggcacttctgagtagtaatgagttgccagcattaatctacgagttactggtcaataaaaaatctggtaaagagctggagaacattatagtagaaaaaatcgtcaatcaatataagacgattgccgggtttgaaaaagggcaaaatctgtcaaatagtttaatcacaaaaaaactgaaaaagagcgaaccgaatgaggataaaattaacgccgaaaaaattattctggccattaaccgagagctggaaatcaccgaaaacaaactcaatatcataaaaaataatcgggcagaatttcgcacaggtgcgaaaagaaaacatatcttttattctaaagagttagggcaggaagcgacttggatagcatacgatcttaaacgtttcatgcccgaggcttcccgtaaagaatggaaaggttttcatcatagcgaactccagaaattcttagctttctatgatcgcaataaaaatgatgcgaaagctttgctgaacatgttctggaatttcgataacgaccaattaattggcaatgatcttaattcagccttccgtgagttccacttcgataagttttatgaaaagtatctgattaagcgggacgaaatacttgagggcttcaagagtttcatctcgaattttaaagatgaacctaagctgcttaaaaagggcattaaagacatctaccgtgtgtttgataaacgatactacataattaaaagtacaaacgcccaaaaagagcaattgctgtccaaaccaatctgcctgccacgtggtatatttgataacaaaccaacatatatcgaaggtgttaaagttgagagcaattcggctctgtttgccgattggtatcaatatacatattccgataaacatgaatttcagtccttttacgacatgccccgggattataaggaacagtttgaaaagtttgaactgaataacatcaaaagcattcagaataagaagaatctgaataaaagcgataagtttatctatttccgatacaaacaggatttgaagattaaacagataaagtcgcaggacttgttcatcaaactcatggtggacgaattgtttaacgtcgtgttcaaaaataacatagaacttaacctgaagaagctgtatcaaacctctgacgaacgctttaaaaaccagttaatagccgatgtacaaaaaaatcgtgaaaaaggcgatacatcggataataaaatgaacgaaaattttatctggaacatgaccattccgctttcattatgtaatggtcagattgaagaaccgaaagtaaaacttaaagacattggtaagtttcgtaaactggaaaccgacgataaggtcattcagttgcttgagtatgataaaagtaaagtgtggaaaaaactcgagatcgaagacgaattagaaaacatgccaaattcatacgaacgtatacgccgtgaaaaattgctgaaaggaatccaggaatttgaacattttctgctcgaaaaagaaaaatttgatggcataaaccatcctaagcattttgaacaggacctgaatccaaacttcaaaacctatgtgattaatggagtgttacgcaaaaactcgaagttaaactataccgaaattgataaactgctcgatctggaacatatttcaataaaggatattgaaacctctgccaaagagattcatttggcgtattttcttattcatgtacgcaacaaatttgggcataaccagctgccgaaactggaagcctttgagttgatgaagaaatattacaaaaaaaataatgaggagacttatgccgagtactttcacaaagttagtagccagatcgttaatgaattcaaaaattccctggaaaagcattcttaa

SEQ ID NO: 284 - DNA, 2415 bp, synthetic construct
  source 1..2415: mol_type = other DNA
atgaaaattaaaaacgaaaataccgataagaaaactgaactctattcgatcgataagtacaaaggccgcgataagtggtgttttgctatcgtgcttaataaagcacaaacaaatcttacggaaaatcctgatctgttcgagcaaaccataacgaaatatgaccggatccggaaagaaggttggtttgacgaggaaacaaagaaattaatctatatccaagagaatgagcacaaaatcaaaggagaaataaaaactctggcccgtgaggtattaaaaaatctgcgcaattacttttcacatcacttttacaaacaggactgcctgatttttccaaaagataacattgtgcgtattattatggggcgcgcatacgaacgaagtgaatatgaaatcaagaaaaatctgaaggaagatatttcgatcgagttacccgctttattcgagccagaaggcaaaattaccacggcgggtatagtattttttacttcattttttgtcgaacgccgatttttacaccgtttgatgggtagtgttcaggggtttaccaaaaccgaaggagagtacaaaataacacgtgatgtttttgctaagtattgtctgcgtgacagctattcagttaaagcgcaggataacgacgcagttatgtttcgcgatattattggttatttgtcacgagttccaacggagtccttccaacatattaaaaatccgaagaaacagaatgagagtcagttaagcgaaagaaagacagacaagtttatctctttcgccctgaaatatctgaaagactatggctttgaggacttgaaaggtcactacacggctttctttgcgcgtagtgagattaagaaggaaaaagaggatatcgaaattaaagatgacaaaaaacacaagcctcaccgtatgaaatccaaaattgagattcatttcgataaaacaaaagaagatcgcttctacattgagcgcaataacgtcattttgaagattcaaagaaaaggcggtcgtgccaatatattaagaatgggtatctatgaacttaagtacctggtgctcctgtgtttgtccgggaaagcacgcgaggcgatcaatcgcatcgacgattatctgaacgatcttcggaacaaaattcctcatattgaaaatatgaacaaagagggtattggcgaacaaatacgttccctgccgggatttgtaagaagccaactgggctttgttcagattgatgatgagaaaaaaaaggaaaaccgtctggactatgttgaaaaaaaatgggaaaaaaagagagccgaatcaaaggagctgaagttgaatcgaaaagggcgggacatactccggtatattaatgaacgttgtaaaaagccgctgacaatcgatcgttataatcgcattctggaattgctggtcgagaaaaatatagagggattttatcatgaactcgaagaactgagaaaaaccggtcgtatagagaaaaatattactcaggcacttgtcggagaaaaaaacattaatgcattacatattaaaatttgcaaactggtgcaggatgaactgaaaagcttagaaaaagaagacctcaagaaatatatcggcttgactcccaaagaagaaaaagtcgtgtcgtttgaagaaaaactcggtcgcatcctggataagccggttatctataagggatttcttcgctaccagttcttcaaaaatgacaaaaagtccttcgcgcgcctggttgaggagataatcaaagaaaaaaccggcggtttagatgtacccattgaaacagagtattatagcatttcaacccttggcagatttgataaagctaacaaaacgttatatgaaacgttagcgatggaccgactttgcatgatgatggcccgtcgctattttctgagtctgaataaaatactcgcaaaacgtgcccagaatatcgaatggaagaaagagagtggtaaagaattcattgtgttcaagtttaatatgcctcaggatacaggaaaaagtatttcgatccggttctctccaaaagattatactaaactttatgtgaagaatgattctgaattcctggcccgcctgtgccagtatttttttccgaatgaaaaagcgattgattaccataagttatactctcatggcataaacaaatataccaacttccagaaggaagggatcgaggctatacttgagctcgaagaaaaaataatcaaaaaacggaaaatcaactctccggagaactacttatcatttgaagaaatactgaaccaaagcatctacaacgatgaagaaaagaatactttgattcagattcggcattctcttttgcattatcagatactttttagcaaaaacgatctgaccaaattctacaacgtaatgaagcgtgaggggattgaaaaaatttggtctttagtgatttga

SEQ ID NO: 285 - DNA, 2430 bp, synthetic construct
  source 1..2430: mol_type = other DNA
atgatcaaaaaacccgccaatcggtttgccttacctaaagtgattatctctgaagtggatagtgagaacattctggaattcaaagtgaaatatgaaaaactggcacggcttgatcgctttgaagttgaagcgatgcattatgatgaaaagaatgagattatttttgatgaggtcaaagtgaacgatggacttatcgaaattgtttacaaagagaacaataaaaagctcgttgtggaaattgaaggcaaagcatacgaaatttcaggccaaaaaataggcggaaaacagcgtctgcttgagaaccgggtaagtaaaaccaaagtgcagctggagcttatgaatcatatagaagatggagaaggtaacaaacgcgtcagccgtaccgagcgcgaattaattgttctgggtgacattaaactctattctcaaatcgtcgggcgagaagttaaaacgactaaagaaatctatctgatcaaacgctttctggagtaccgctcagatttgttattttactatgggttcgtagacaatttttttaaagtcgttgggaatgaaaaggaactgtggaagattgacttcaatacttctcattccgaacagcttatcgaatacattaagtataccttcaatgacaatttgaaaaacgatcgtcagtatctgaatgaatatgttacgaatgatgtgcagatacaaaaggactttaataaagttaagaacgttttttcagagctgcgtcatgccttgctgcactttaactatgattttttccagaaacttttcaacgggcaggatgtgggctttgatttggacatcgagtttttaaacctgttcattgataatatagacaagctgaatatagagacgaaaaaagagtttatcggagatgaaaaaatccgactttttggtgaaaacctgagccttgcaaaagtgtatgaactctattcccatatttgcgtgaacagagttggattcaacaagtttatcaatagtatgctcataaaagacggtattgaaaatgaagccctgaaagacaagtttagtaccaagtttactggaaatgcctattatatcgatattcataattcccgtgagtataaagacctctataagaaacacaaacgtctggtgattaacgtttcaacactcaaagatgggagagccattcgtcaagagaataaaaaaatagctgaactgaaaaaacagatgaccaccatgacaactacgaattctttggctcgattagaatgtaaactgcggctggcattcggctttctctacaatgaatacaatgactacaaagctttcaaaaattcattcgactcgaacctgaaaaacaatcagtttgacgttagcaatgttgatacatcgaaagcgtatttcctttctacttatgagaaccgtaaaccacgcacaagagaacgtattgacaaagttttaaaagaaattgaatctctggagctgaaagggcttatcgcgaatgatcccctgttaaaattcatcttgctgatgttcgtctttatgccgcaggcgttaaagggtgaatttcttggttttgtaaaaaagtactatcatgatgtacacagcattgagaaagatacgaaagataaagaagaggacttaatagaattcatgccgttgtcgttaaaactgaagattttaggccggaacatacgaaccttaacactgtttaagtatgcgctcggctcaccgataaactataatagcaccgacgaagtattttatgtcgaaggaaatcgttatggtaaagtttataaacagttgggtatttctcacaatcaagaggaatttgataaaacactgacggtttcccttttacgttactactcggcattattcaaactggtaaacgattttgaaatctattcactggcgaaaggcaatcctacggtggtcaacttagatgtgttggtggatgatagtagttccccgtataagtttcgcggcttctacaattttggaaatatgatcggtcagattcatggtctcactcacaatcaaattaagaatgaagagatcatgattagaaacaagatagcacacttcgacatcgaaatgttactgaaaaagcctctgctggctcaaattaagttggatgtgcagagaaaaaacttgattaagtttatagaggatcgcggcgatatgaagagtgtattaggttatgatgctattaatgactttagcatgaagatggttcatcttcggacaaaaatcaaggtaaacagcgataagctgcaaatcatgatgggcttattgactaatgtcaaaaccccaaacgatttttacaacatctacaaagtcaaaggtatagaaagcattaatcagcatcttctggatgtcattggggtaacagagtccgaaaaaaagattgaaaaagagataaacgagggtaataaacgcgcagtaaaataa

SEQ ID NO: 286 - DNA, 3384 bp, synthetic construct
  source 1..3384: mol_type = other DNA
atggaaaatcttagtaaagaacaaatagtagaaactcaggagcaaaacaaaagaacgtggggtaatgaccctcagtattttggggcctatctgaatatggcacggttaaacatctataatgtaagcaatcatcttgccgaaaaatttggtattaccgcgattgagaatgaagagcagatttcaaatagtttcttgggggataaagagaataaagttttcaagaacaagcagaaccatatattttccaatctgatacgttatctgcctattgtaaaggttttcgatttcgagaaactccccgaagaagagaaaatctcactgaaagataatttcggtaaagattttaaagaactctcagacacgctgaaaattatctttagtgaaataaacgagtttcgtaatgactattctcactatttttctaccgaaaaaaagaacaaacgtaagacaaaagtctctgataagttaaaggacttcttaaacattaactatacccgtgctattcaatatacaaaaaaccgctttatcaacgtcttttcagataatgatttctgcctggcagaggaagcgaaactggtcgaaaatgataatacaattacacaggatggtatcgtattttttacctctatgtttctggacagagaaaatgcttttcagttcatctcgaaaataaaagggctgaagggcacacaaacaaaagcgtttaaagcaaaacgtgaagtcctgatggccttttgcatcaatctgccacacgataagtttgttagcgaaaatacagaacaggcattttctttagaactcattaacgaactgaacaaatgtccgaaaacactttataacgtgatctctgaaaatgagaaacaacattttttaccgaaacttgaggacgaacaaattgataatgtgttggagaatagcgttccctatactattgatgattacgaaaattacatcgagaacattaccaaaaaagtccgtaataagaaccgcttctcctattttgccttaaaattcatcgatcaaaaggagctgttcaaaaattggaaatttcagattgatctgggtaaagttgtgttggacgaatataccaaaaccttacaaggcaaagacgaaacgagaacggttgtggaaaatgcgaaagcgtttggcaaacttcagcacctgaacgacgaggaaaatgttcttaataaaatcaacaaaagcgaaagcaaaacccattttgaacaattcgctccgcattataattttgacaataataaaatcggtatctcccgtaaagaggatagcgcgatattcatttcacgcaacacagataagaaagtcaagtttaatctgaaacaaccgctgcctgaagcatttttatctattcacgaactgcccaaaatcatcctgttggaatatcttgaaaatggcaagacggaacagctgataaacgatttcattgagatcaataattcgaaaatcctgaacaaaaagttcattgaatccattaagagtaagctgaccgattttaacacctttaacaagcggagtcagggtcgcaaagagaaatccgcgtataagaaagaagccttaaaatatttgctcgatcgcaaagaaaagctgaatcagatattagccgaatacaatctgaatgtgaaacaaattccaacccggattttagattattggttaaacgtagccgatgttcaggaaaaaaccgcaatttccgatcgtattaagctgatgaaacgcgattgcatggaccggattaaagcgatgaaaaagggaaaagccccgaaaattggcgaaatggcaacttttattgccaaggatatcgttgatatgattattggggaagaaaaaaagaagaaaataacgagcttctactacgataaaatgcaggaatgtcttgctttatttgccgacaaagagaaaaaagaactcttcatacacatttgtaataacgaactcaaactgaatgaatcggatgggcatccatttttaaagaatattatactttacgattaccgctatacttccgatttgtatagacgataccttgaagaaaaagctgataatcgcaacaatcttaacaaaaacgacacgtcatggctggctaagaatttttacttcatcgaaaaagttgaggtcttcgacaaacggctgaaccgaatggagttcaaacctcaaacagtggtgaaaattaaggataaaagcaaaatcccattcactttacgacagttagaaaaagagaaatcttcctttgatacgtggtttgaaaacatcacaaagggcaaagaaacaactgataaaaagaaacccgtagaccttccgaccaacttgtttgataactatcttaaagagcttctgattaaagatctgtcgaaaaacaacatcaagttcaatcctaagacgaactataatgaattgtttaagctgtggtggaaagagtgtcggaaagataaaactcagagtttttacaatgctgagcgtgaatattcatttgaggacaaaaagctcaattttaagatcaatacgaaatcaaaatttgaggactacatcaatccggagttcgcagagaaagtgttcaaacttaaaagtagccgccgtgaaaaggaaaatagtactggtcgtaaacttccgccattgatgatcaaagatcttgaaaaaagcatggcgaacaaaattggaagtattgagaaagatatcagaatattacaggaagatgactgcatgatgctgctgatgtttgaaaaacttgtagacaataatttggaactgaaattagagaatgtagacaccctcatgaacgaatctatcgagataaagcagagtattttaggaaagctctcatttgatgactttggcgataacgtgaacaaaaatgaccgcataataattagcaaaaacataaccgagacccggaaacgtaaggaatattcagttctgaaaaaatatattttcgatcgcagattgccagagctctttgagtatttcgaaaccgaagatataactatggaaaaaataaagctcgaattgggtacttacaataaagcaaaagacatcgtgttcgacttaattttcgatttggaatcggctattattaaaaaaaacgagaatcgaatcaaggagctgaataaagataagaatggaaacattcagacgggaaatattcagcataaaccttatctgttttggctgttggaaaagaatctgattacagaacaggagtttacctttctgaatatggttcgtaatactttttcgcataaccagtttccgcagaagaaaacaatggagctgtttataaagaattggaataaaaacgaatacgcaaagcaaattctgacggtttacactgaaaaaataaacaatcttatcgagaaagtgattgacatttga

SEQ ID NO: 287 - DNA, 3123 bp, synthetic construct
  source 1..3123: mol_type = other DNA
atggaatctttccctgattacaaaccgctgtttgctgcctatctcaatatggcccgtaacaattgttttatcgcgctgagtcatatagcagaaaaagcaaacaaaggcggcggtatgaatgaagatgcgatgcaggaatgtagtgtcataacgctcttagccaataataaaaagccagacgagtctttaaaggtcgaagaaatgatcaaatatcattttccattcaccaaatcaacaaagcggattgatccggttccttctgactatgcgggcctcatcatttcctttattaagcagttgaacgaattaagaaatttccatactcactacttgcatcgtccgtatgctactgatgctaatgttattgcgcagttacagtttctgttcgatacttcacgcagagaggtgcgtaagcgttttgcactgaaagaagaggatgtgaaacacctcgtgcgtaaaacaattacaattatcaatggcgagaaagttgtagtggaaaaagacaactatccttacgcgttcgtaaacaaagagggtcaattcacaacaaagggcatagccttttttatcactctcttccttgagaaaaaacatgcatatctgtttctcaaacagctgcgtggattcaaaaatagtagcagcaaacagaacaaagccacattagaaacctactgcttttatcatattcgtgtgcctcagccaagattacaaagccaggatactaaagttgggtatctgctggacgttttggaagaattaaaacggtgtcctaaagaactttattctcatctgtcagaacacgaccgaatgcgttttacgtttgttaacgacattgatgctacggacgagcagccggaaagcattttgaaacgtaacaaagatcgtttcgcgcatcttgcattgcgatattttgagcatactggtagtttgaaagaactgcagttttattacgacctgggtaagtattatttcaaagtgtacgaaaaatctgtcgatagcgagattcggcttcgccgccttcataagtacatgaaaggatttggtcgtttgaatgactttggccttgaaaacatgccgcccttatggcaacaattggttaagtacaccgaccagttatctgaggggtatgcggaaccttatattgtttacaccataccgcattatcacatcgtcaataatcaaattggtatctggattaacaatgggtttataccgccgctgctgtcgccggtgagtagtccagaaccacagatgtggctcagtatctatgagctgccagcgataatgttttatcatttgctgacgaaaaaacgaaaagagtacaaaagcgtcctgcagatcctgtctaaccaccgtaaagcgattcatcttcttttcaaagatattaaggattccaaactgctccccgatgcagtggaaacctttgaggccgaattaagacagcggggtttacatcgcaaccacatcccgaagcccttgctggaatatctgctgaatgaaagcccaggaacgcccgtagccgccaaagcagaaaatcgcctgatcaagctgcaaaacgagacaagctttctgtttgataagatcgatattgatctggaaaaatcgaaagaaaaggctgggggcaaatattataagccgattcaaacaggtaaaatcgctcagtttttggcaaaagatatgctgtttttccaaccgccgattaacaagctgaaaggaaaagcaaccggtactctctttcaggttctgcaggcccgtcttgctttttatggcagagataaacatcttctcgaagatatctatcgcgagtgtaatttgatccaatcaaacaacccacacccgtttctgcaaggacttcctattacggatagcctgatcgattattatcgcaattatcttgtccggcgaaacacgtatcttgaaaaatgcctcaaaaaatgcatgcaggggaaaaccggaagccaagagcttcactttctgcatcttggcgaacgagaaaaacgcgcaggtaatgattattataaagggcttgcggggaaattcatcaagatgccattaaacctgccccgtggtctgtttatggaagaacttctgaaggttttttcagctgagaataaaacaatgcaggacatcgcggataattcgcgcacgaatacggcttttcttattaaagaatacctgaaaaacgtactggacgatgatacacaggatttctacaactggaaaagaacttatgcagtattcaataagtactacgacaatcgcaaaccccagagccgggatagtctgattgaacgatacttcgatacctctgtgctgtcaaccgaggcggaaaaaattaaacttgaaattgtaaaaaaacaacgcgtcgatatagaggcttccgaaaacattaaacgtaattatcgctactatagtgagaacgaaaagcagatcagacacaccaaatcctgcgacatagttttatttctgataattcaagacctgttcccttcgctcgagcaatctgtattcaaaggtttagcaattaatcagttaaagctgtccgatattttacctgatgcggaaaaaggcattctctcattgccaattgagatacgccttccgctgtataacaagttcatcatccagcggggcatcaaactgaaaaattacggtgacttccgtcgttttttaaaagaccgccggttacagtcgctgttaccttattttgaggaagaatccattgacagagtgataattgaaaaggaactgcaggattatgaaatagcacgtatagagattcatcggcttgtattggagtttgaaaaaaaggttataaccgagaataagatcacatacgaaaactccgagattaattatgttgatcatgaaaaagtgctgaccgctttctttcagaatgagccttcctctaataaaaaagagctgatacgcgacattagaaataagttctcgcacaatgaatatccggatgcaaataagtttaaaggattaattgaatcagattcacttaatacgactgtcgccaaaaagtttatccaaatagccaagcagtactaccagtttgaaattgcccccgccccgcccttgttagtgttatcaccaaccagtaccactattttgtaa

SEQ ID NO: 288 - DNA, 3189 bp, synthetic construct
  source 1..3189: mol_type = other DNA
atgtccataatgaatattataaccgttttaaaccatattcaccagatcgctgggttaaaacgaaatgaacttggcgatgatgataacatctattcacaccccgtgctcaaatacattgcccctgaaaataatagcaccacgttgccggagaaacgcgatctgataaaagagctgcttttggagtatctgccctttcttgaagcaatgaaagattgttacaaagaggtcaaagtagagaaagataaacgaaacaataagtatgtgaaagacaaaaaacaggtctttatccgcaattactcggatatctattgtatctactggactctgtacaacatcttctccaccttgataaactatcgtgataaaagttgtcattatcgttttatccctagcaaagaccaagaagaatattccaaacgcacagagtatgatacagtacgtataataaacaaatattacacatacgcgttacggaaaaccaaagaaaagtacggttacacgaccgaacaactctcttttattcaaaataaccggtatacagatgacaagaaggtgaactttaatttctttttatcgatgcagtcctcgaataataatctttcgcatgttggcgttgcacagctgatctgtctgtttttacaaaagaaagatgttgataatttcttggagaatttgccaatctatgacaatcgttattgcctgggcattgatgaacacatgataatcaaacgttctttagccttacatagtataaagctgccaaaagagcgccttaacagtgagaaaaaagatatggcaattgcaatggatatgctcaatgaattaaagcgttgcccaaaagaattgttcaataccttaccatttgataaacaggaacgctttcgtattatctcatcagaccataaagaggtgttgctgatgcgcagcaccgatagattcgtccctctgattctgcaatatatcgactgcaacaaaaaattcaaggatatccgctttcatgtcaatatgggtaaactgagatatttgttctcccctaataaactgtgcatcgacaatcaggagcgtgtgcgcatgttggaacatctgttaaacggctatggacggatagatgaagtggaatatctgcgcaaggctcctaacggtacgttcggcaataccaatatacctataaaggggtttggcgaaattgaacgtgactctgctgacagcaacaactatccgtacatcgtagacacacatacacactacattctgaataataataaagtagagttctgcttttgcgaagatagtaagaataagaatgtcttcccaactattgaaaaggaaataaacggaaaatggtatgttgagaaaactgccccgcattgccgtattagtttctttgaaattccggcaatggcgttccacatgtttctgtgtggaagcgaaaaaaccgaaaagctcatcaaggatgtttacaataactatatcagcctctttaatgcgttaaagaatggcgccttgaccgaagagaattataaagattttaacataccggaatgtgacatgcccaaaaagatactggattttctgaaaggcaaagccgaagggaaatcaattgatggttatgtaaagaacattttaaaaaaggagctgaaagatacgcggaaacgaattgaacaggcgccatcggaaaaggaccagatgccctcaaaacgtaataagataggtaccaaaagttacaaaagagtcctcacggggaaacttgccgactttctggccaaagatattgtgaaatatcagccaacgctgtgcgcaggggatgattatggcattgaccgtatgacgggtatgaactatcggattatgcaagcgaccattgcgacctataatgacgatgatgattttgacacgttctacaatgtgtttaaaatggcgggtctggttgatggtgacgagcgtaaaaaccatccgttcttaaaaaaagttcttcttagtaaaccccagaatacggtagcttttaacatcaaatatctcaaagaaaaagagatctacctgcgcaatattgagaaaaaaaatatcattccgccgtttgttaaccgagagagaaataagtggtgcgaacgcgactgtgaatattacagaattctgggagaaaatctgcttgacttaccgattgaactgccacgtcagatgttctacaaagatattcgggctcaacttgaaccgttaatgcctgagattgattttagccaaactaatactacatatctgattgctgaatatctgaaacgcgttcgtggtgatgattttcaggagttctattcttgggaaagaaattacagatatatcgactttctgaaatgtatccgggatgataatggacgcatttgtgcgcaatatacaacgacagaggaacgggaatctttatgggaagatagcaaaaaccggaccgctgaatataaacgatctgaggagcagaagaatgaaaaaaaagataaaaactttgaagacagtttggaagaacgtatatcatcaagccacatcaagtttcagaatactgaaaaacatattcgtagatacaaagtccaggatgctctgttgtttatgattgcggaaaaacagtttgggaagtatcttgatgatattaaagccaagaactttaagcttaaggatattatgcccgacacggacaaaggtattctctctgagacaatgcctattgatttcactttcacaaaaaagaacattaagtataacatccacgctaaaaatctcaagtttaaagagtacggtgatcttttcatattggcaaatgacaaacgcctggaatcattgtggaaaatcctggcgaccgacactgtgaacaaagaagaaatttctgaagagtttgcaaaatatgatttttgtcgtccggacattactaaactggttcttgattttgaaaaagatgtacttgagaagtatcctgagattattgaagaggcagaaaaggagtataagaaatttgacttcaagttcatcttagattggctgattaacaagaaaaaactcaactacggaatacgcaacaagctgttactgatcagaaatgcctttaatcataactcctatccggataaaaaatatgcagaggtgcgagaattaccggaaattgcaactaatctgaaaaaaacatttgacgaaaacgccaaaaaatacgaataa

SEQ ID NO: 289 - DNA, 3567 bp, synthetic construct
  source 1..3567: mol_type = other DNA
atgcgcattgtcaaaccttatggacgcagtcatgttgagccagccgctacaggtagcactcgtcgtgtactgcgcttgcgtccgccgaacgacaaagatgccaaagatatcgaagcatttgcacgctctcatgaagagcttgtgattgcgcaatggatatcagcgctcgacaaaattgcaaccaagccttccggtaaagacggtgccagcgatgcgcaacgcgcttttcgggaacggttaggaaacgcggcctggacgctgctggaaacgaaagggctgcttcccggcttggtgacacggcgtgaacacttaaccatgctgtggcgtgcaaaagtccatccatacggatcgacaccataccggccgaaaagaggtaaacctgcaccttcgctgaaagggcgtcgatatgagcgtttcgccggccagctcgaagtggataaggtagatgcagcagcaatcgcggcgagcattcatgcacatcttcatgggacagctgtaccagcggtccgccccggattgatagccactcgtgcacgctcaattgcggagaacgtgcttcgcccaccgcagcggctgcctaatgaggaacggtcgtggtccgatgacgatgagcgagcctatgctgctgcaggcgatgtagcccgcgaaattcaagagttagcgatcgcaatcgaggaagacgcaagccagcggcgccgtggaaagccgcttacccgtagcccatttgctttacgtgatgcagctcccgctttgcgcggccaatatggtagattattagtggatgcgtcgggtgatgccctgcctattgctcaggcgcgcgctgcgtttcctggcttatttggcctgcacatggcggtgcgagactgttattcgcgcattctgaaagatcatagaaaaagttctgtcgtacgcatcttgccgcgcgatatggaagagttgctccggctggttggggcaaaactgactaatcgcgatctcaatgcgatggtaagactggggaaggttattcattaccagtcgtctcttggcgtcgaagatagtcctgaaaatgtggcggccaattggcccgcagacgtgtctggaagcgagttttggaccagtgccgggcaggctcagattaaacgcaacgaggcttttgtacgcgtatggagacatgtcctggctctggcccaaagaactttaacggattggatcgatccccagggtaagacacaaggtgatattctgttagcgaatccgccctttaatcgtgacgcctataatcgcaaatctgatcttctgttcggcaaaagagcctcactttttaagggcgttgagacatttgaaaatgtcgtgctgacacttgctcgccgtgaaaccgcagccctgcgtcatggttcttttcatttcaaaggattaggcggattcaccaaggttttggccgaagttccaaagaccgacgcatccgtgcttgccgcggttcggacgttatgggaagatgatttgagtgaacgagcacagcgcctgcgtcagacgctgcgcggcgctcatgtagagtatttcctcgacgaagcgcagggtagacgacttttatctgcggtgctcgcagattcaggaccggcaaccttgccgctgccacgctttagacgtattctgcagcgagcacataatgcatgggcaaaggaaaccgatggtcccggtttacctgagcctgcaaaccgcatggacattaagacatatccggccctgcattgccggtatgtagctctgaaacatgtttacgaacggccatttcggcattggcttgaacagcgagacgccgcgtcactcaatcgtcacattgatcgtgcggttgatcgaggtactaaagcggctcgtgatctgaacgcgggcgacgatgaagaccgtcgtcgtattatagtcgctcgtgcagcctctctcggtcgtttagccgaagatgataatgttcaggattttttcttcgagctgtcagccgaaacagccggcgaaatgcgtgttcaacgtggatatgcaagcgatgccgaggctgctcgggaacaggctgggtacatcgaggacctgaaatgcgatgtgttagcgctcacctttgccgactatctgaaagctgccgggctggatttcatacgtatcttggcgccggagacgccgagacccgacaatgcagcatataatctcgatgctatagaggcaccggaaattgatactccgggtgaagattggcagcgggttctctattttatcttacacctcgtgccggtggaagatgttggtcggttgctgcaccagactagaaaatgggaaattctggccggggatgaaacgctttccccctcagtgcgggaccgacttcgggggattcaattggctctggaattgtacttagacatgcatgacgccaaattcgaaggtggcgccgcactcgttggtaccggcgcattcaaggatctctttgaaactgcacgtatattcgacgacatttttccttctcagcccggatccgcgcagactgcggatgacgaacgccgcgtgccaaaacggggtttgtgtgaaattatgcgcttcggtcaccgtccggcacttcagccgatctttagccgctaccgcgtcaccgaacgtgaagttgaagaagtccgcgccatggaatggccggtggacggtacctcagaaatagccagactgcaggaccgtcgcgaaagactgcacaaaggatggacggaaaacaaaagtgggctttccggtgatgatctgagagcctatgtcgctgcgttgcgtgaggttgcagctcatcgccacctcgccgcgcatgtcaccctgacaaaccacgtgcgtcttcaccgtcttttgatggcagtgctcgggcggctggtcgattattccggcttatgggagcgcgatctctactttgtaaccctggctttaatacaccgtgctggcagacggccggcggatgttttaccagcagatgggttacgatttctggccaatggtcagattgttgaggcagttcgacgacttgagccagacctgcaaagccgtctgctcgactgtttgggcgatatcgataaaaacgggaaagtacgcatccgtaaccgctttgcacacttcaatatgctgcaacctggaaacttacctgttgatctgactcgttgcgttaacgatgcgcgcgaactgatggcctacgatcgtaaactcagaaatgcggtgactcaatcagttaaagaactgttagcgcgcgaaggtctgatgttaggctgggctatgggcgctgatcatcgcctgagtgctgcgacactggcgacgagacaggcgcaacacctgggtaaaacgcgccgcggcgaaaagggttggcatgagcgtaagttacgtccgataccaatccttgaggacctgcatggccgtcgctttgttgatatggctgccgccttgtttggcggaaccagactggaaccggagcgcagccttctcgatcatcctctggaccgcatcgagtggaacccgacgccgaaaaatcggtatgggagtcgccctacaagtggacaaggtcgaagaaatgtcgtaccacgataa

SEQ ID NO: 290 - DNA, 3339 bp, synthetic construct
  source 1..3339: mol_type = other DNA
atggaaaaccaggagctgaagacacgcaccatgaaaagcgaaccatattattatggggccttcctgaacatggcccgtttaaacattttcaacattagcaaccacttatcgaataaactgaacattctgcccaccctgtccagtgaagagcatattgctaatgcgttttttaccgacaaaaataccaaaataaaatgggagcatacgtacgacattctgagacgttttatccccatcgttaaagttttcgatacggaatctttgccaaaaggagaagtcggtaacaatacgggaaaagacttctccaaaatgtcggataccttaaaaattatttttaaagagcttaacgagtttcgcaatgattactctcactattactcgaccgaaaaagaggataaacgcaaaattactatttcagatgaactggccaattttttaaacgagaactttaaacgcgccattgcttataccaaaaaacgttttaaaggcgtctttactgagaaagatttcgagcttgccaacaatatccaattattcaataaggataaagaaattaccgaaaaaggacttgcgtttctcacgtcaatatttttagaacgcgagtacgcatttcagtttatcagcaaaatagaaggactgaaagggacccagaaatcagaatatcgagcgacacgtgaagtttttatggcatattgtgttaatttgccgcatgataagtttattagtgaagatgcaaagcagtcattctctcttgatataattagtgaactgaaccgttgtccccaaaccttgtttaatgtaatcacggaaaaggaacaggaaaaatttcggccgactataaaccagcaggagaaaaacaacattataaacaatagtgttccgtatgatatcgaggattacgaagagtatgtaaacagtattactaagaagattcggtatgataatcgttttccattttttgcgctgaaattcatagacgaaactcaagtctttgaaaaaatacgtttccagatcgacctcggggaaatactgctggatgaatatacgaagcagttggcaaataatgaggaaaaaagacaagtagtgcaaaatgcgaaagcgtttggccgcctgaacgatttcattgacgagaataatgtgctggagaatattaataagcagaatggctctgcttcgtttatccagtatgccccgaattataattttgataacaataaaatcggtatcgacacaacgggtaaacggattatgcctatactcactaagcagacagacaataacaagaaagttaaaaacaagttaaaacaacctctgccgaaagcgtttctgtcaatccatgaattgcctaaaattattctgcttgagtacctggaaaaaggtaaggcagaaaagttgattaatgattttttattgatcaacgaatcccagctgcttaattacaaatatatcgaggaaatcaaaaacaaactgaacaatttcgacgtttttcagaaacggagtcaacgtaaaaaactgcagacagcttataacaagaccaacatagaggaattacagagccgtaaagaagaattaaacaaaatcctgaaagaatacaagcttaatgataagcagattccgacccgtattctggaatattggctgaatatcgaagatgtaacgccaaatgaggctatttctgatcgcataaaacttatgaaaagagactgtgtggatcggctgcgcgacataaaaaaaggtaaagccccgaaaataggagaaatggccacgttcattgctaaagatattgtggatatgattattagcaaagatatcaaacagaagatctcatcattctactatgataaaatccaggaatgcttagctctctacaacgtttccgaaaaacgggatttgtttttgacaatttgcaatgaactgcgattgctggatgccgataaaggccacccgtttctgaagaacatcaacttgaatagaatcaactatacatccgatttttatgtcaagtacctgcaggaaaaggggcataaacttattaaagagacgaactatagaacaggtaagctcgtggagaaagataaaagttggatgttccttaacttttattatctcaagaagaatgagacacttaataagatgatgaccatcgtgcagctcccagatgataaaagcaaactgccttttactattgcacaattagacaaacccaagaatactttcgaagaatggattaataacattactaagggtaagaccaagacagataaggaaaaacctattgacttgcctacaaatatttttgacaaggagatcgaggagatcttgaaaaacaagctctcggaagagaaaattgcgtttacggaaaatgcaaattataatcagctgtttaaactttggtggaccgattgccgcaaagacaatgtgcagaaattttatgatgctgaacgtgaatatgtcatctatgatgaacatgtgaaattcattccaaatacaaaacctaagtttgaaaactactataacgaaagttttccgatagttttaacccgtttaaaaagagatcgcgaagaagcacgtaagcttaatcgcaaactcccgcccattgaaaaatcccaagttgaaaaagtattcaaacaagcgatcggttctaccgaaaaagaaattcgactgttgcaggaagaagatcgtataatgctgctgatgttcgaacaactgttagagactgacaataatcttaacctgaaattaaacaatgcagaaagcttgctgaatgagcaaatcactattaaagagaagatcagccttaaactttcattcaatgagcaagaggacaaaaaagagataataaagacgatcattgacaagcgtaagcgcaaagacttttctattctccgaaaattcaagtatgataaacggttaccagaattatgtgaatatttcgaaacagatgatataagccattctgatctgaagaaagagttagacgaatataataaagcaaaggaacaaattttggctaatgcctttatgttagagaaaactattatcgaaaaagacaaagatgggataaaagccctgttccttaatgacaatggcgaaaaaaaatacggtaatgtccagcataaaccttacctgacgtggctgaaaaataaaggcctcattaacgataacgagtacttgttcataaacatggtaagaaatacattttcccacaatcagtttccgcaaaagcgaactattcagattttcatagacaaaaatcgcggcaatccgataacctttgcagagacaattaagaatgcgtacaataaaaaaatcgaggaaattatcgtgaaaatcaaataa

SEQ ID NO: 291 - DNA, 3417 bp, synthetic construct
  source 1..3417: mol_type = other DNA
atggaaacacaggaaaatgaattatttgaaaaccgtcggcgaacattagcggatgatccacagtatttcggtgcgtaccttaaccttgcccgcctgaatattttctcaattaacaactatctggcaaaagagtttcaacagacggaactgcgtgatgacgaacttatccaaaatggctttatttgtattccaagtcagaagaaccggaatgataataagctgttcgagcgccttattcgcctgatgccggttatcaaacagtttgatgctgcacgactgcctaatgaagagcagaaaagcggacaagctgaaggtaaagatataaagactatggcgaaaacgctgaaagcacttttcaaagatatgcaggagtttcggaatgattatacccatttttatgctaccgacaaacaggagtgccgcaaactgactgtttcatccgaaacggcaacgtttttaaaagcgagttttgcccgtgcgatcgaatatagtaaagtccggttcaaggatgtactggctgaagatgattatagcttagtagcaggcaaagagctggtggaagatgaaaatacgattaccaccgaagggctggttttttttacagctttgtttctcgaccgcgaaaatgcgtttcagtttattggcaaagtgcaggggttaaaggggacgcaattcaaatcgtttattgcgacgcgtgaagtgctgatggcctactgtgtacgtttgcctcatgataaactgatttccgataatccgattcaggcgctgttattcgatatactgaacgaactgaacaaatgtccaaaaaagctgtacaatgtattgtctgaagaagtgaaaaaagagttcagaccggaattatccgagagcggtattgaaaacatgttggcaaacagtttcaacgacgaagagcgggaaaagttactcgatgagattgagtacaaagagtatatcgaacaactgacaatccgtgtgcgccatagtaatcgttttcactattttgctatgcgttttatcgacgaacaggagctttggcccggcatccgttttcagatcgatcttggcaaatacacccttacacaatacgacaaacaggtcctcggcgaatcaattcctcggtctgtggtagagaatacccgggccttcggacgtttaagcaactttctgacggcagatcccgattcgctggaacagcgcatcgatgttgaccatcgggcgaacggattcgaacagtttgcgccgcactataatgccgacattaataaaataggcattgccttcaccgagaaagaacagttaccttatgttgtgccgacaaaaaatgcagaaactaaccgtgtaaaatactccttcaaacagcctcaaccagatgcttttatctcactgcatgaattagcgaaagcaattttgctcgaacagttgcaaccgggtgaatcagaaaaactcatccgtgcattttgctctactgcggaaaataagctctttaatcttgaattcattgaatccatcaaatggaagttacccgactggaaaccatttcagaaacagtgtgacactaaaaaaagccgtgcttatatcacaaagaaaaagatgttcgcctatgcaccaagagacagaaagaaactgttagatgagttattggctccgtacggtttgaactggaaacaggtgccagaaagaatactcaattattggctcaacattgaagaggtacacgatgcccgttctataaaggagcgcattttacttatgaaacgcgatggattaaaacgactgaagcagttagaaaaacatcggaaagatccgtctatacgcattccgaaggtgggcgaaatggccaccttccttgcccgcgacatagtggatatgatgattgataagacaaagaagcagaaaataacctcaatctattacgataaaatgcaggagtgtctcgccttttatgccgatgccgagaaaaagcgacagtttattggtttggtccgcgagcttaatctcaatgcacctgacggccatcctttcctgaagaatcttaatctcgaatcaatccgtaaaacatcggagttttacaaactctatctgatggaaaaggttgagaaaatgatagagaatgggtacaaaagcaatggagataaaagattcaaaaatatcgcatggataattcgggtctttgaagaaaaacaaaaaaacgagaaaaacggtaaagatgacactatctatcgaattccaaataatagaaatgacattccctatactatacggcaatgggaaaaagagacttcaacactcgaagagtggcttcacactatcaatcatggtaaacaggaaggcgaccgtaaacgcccgatcgatttgccaaccgacctgtttgatgctcgtctgtgcgaactgatgaaagggcaaatgcaagaaaacggacagacatttgcagatacagccaaatataacgaattgctgaagcagtggtggtctctgcgtgaagatgaaacgcaaccgttctataacggtgctcgtcattatgtcatcaaagaagaggctgtctgctttatgccaggtgcacagccccggctgacttcgtgctatgccgatgcggttgaagaagcatataatagattaagtgccgaacgtaatattgcaagacggcacaacaaacaattgcctctgatacagaagcaaaaggtggagaaggttttcaaacatacgctgtacgacaccgagcgcgagatacgcctcttaggcgagcaagaccgcattttgttgctgatggccgaacagctcactccgggtagagaaaccctgaaactgaaaaccgttagtgaagaactgacgcgacctcgcgaaattaaaaaggaatttccttatatctccaattataatgcgcagggtgagaaactgccgaaagatgagccaaaaccgaaaataaaagtgacggtaaccggcattatgcagctgaaaaatagcaacgatcttaaccgctttgcccatgaccgacgtatgcctgagctggtagcctatctgcccaatgcgacaatagatgctgataccttacgctacgaattgatggattataataaggcgcggctcactgtttttgacgcagtgttcagacttgaaaaggcaattatcgaccaagaccgcgagggagttattactctttttaccgatgagcagggtgaagcgaagcagggtcgtatgcaacacaagccctatctgcaatggttacttaataaagggataattacccagccggaaagctcctacctgaacatgctgcgtaatagtttttctcacaaccaggttccgcatattgcggttgctctcaacggtacggaagttgtcccggtcaaaaacattgcatctaccattgctggggcttacaaacaaaaaatcgagacaattattgggaagatcggataa

SEQ ID NO: 292 - DNA, 3447 bp, synthetic construct
  source 1..3447: mol_type = other DNA
atgaataataacatactggaacagtcaacgtcagggtcagaaaaacgagcaagcacccgcactctggaagctgacccacagtattttggcgtatacataaacatggcgcgccataatgtatttcaaatcatcaatgcgctgactcacaaattttccaaacagattgagaatgcaaaaccgattaacgatgatgaaaatattgctaacgattatttgatcaacataggaaaaggtacagacaagagtcctactattattgaagtgctgaatccggctcatccgctgcatcgcctttatggcgaacacgtgttccgcgcgctgaaacggtatctgcccctggttactatttttgaagttccgtctatcaatacggaagatattattaaagataccgatgatatactccccgttctctttcaagacttatatgaattcatcaccctgcttttttacgagctggttaagtttagagacgcctatacccacgcactcgctctggatgaacaggggaatatcgtacccagaaaaattgacctgcaccctaacctcagacactattttgaacacctgttttacaaagcaccagattatactttgcgcagatttcgtagcacacaggaaaagattgcgcatgggtttcatgaaaaagattttgcgcttttaaaagcacataacctgtatcaagacccgcattctaacgagctgacgacacaaggtctcttctttttcactaccctgtttctggaacagaaatatgcatatcagtttttgaagcgtttcaacggcttcaaaaatgagactatccagccttttaaagccaccttgcgcgtgttcaccgcattcaccgtcaaacttccaaacgacaaacttgcgagtgatcatccgggtcagtcattcttattggatatgctcaatgaattaaacaaaattcctcagtcgctgttcaaacacctgacaccgaaagatcaggaaatgtttgagcgtatcaatgacgaggcactgaccaacatattaaaaaataccgatgaggcttcctttaaggatgtagacgatctgctgggcaagatggctccgctcatacgccgggaagaccgtttcccttactttgctctttggtttttagagcagactaaggcattcaaccatatccgtttccagattagtattgggaaaatcgcctactccccatacgataagaccatcataggtgagacgagcccgcgtatcatcaaatttgatatccatggatttggctcattggccgaattctctgatgaagatacgctgttaacgacccttaaacggcaacttcccgcaggcagcccacatgcatcattgactttttctcaatacgctccgcactatcatattaagaataataaaatcggcattttggtggattacccgtcgggtgatcgtccattatccaacatcacacaacagccagacggaaaaattaaagtcaaccatattaaaccgacagccttcatcagcattaacgagttaccaaagttggttgttcttgctcttctcggcacaaacaaagacaataaacctatcggtaatgatattgagcgtttaatacgcagctttatcacgaaattcaaaaatcagttatttcatctggcccctttaacgaaaattaaaaacggacttaccttttcacctgagacattcacgcgtcgaatggataaagacaaaatggtcaaaggacgcattccaaaaagcgaactggcgaagcgggaagagtacaaaatctatctggaaaaacgaaaggctgtgctgcaaggtacaacagacttaaagctgaatgttaatcagctgcccacgaaaatacagaactatctcctgaatattgatgaggtatcggatgaaaaatccatccacctcagaataaagactatgatcaaagaggttgaataccgccttaagaaaattgatcgaaacaagctgccgaaagtaggtgacattgccacctatatagcccgtgacatgcttgatatggtggcagatgtgcggaccaaatctcgtatcacctcagcttattatagtcagattcaacgtgcgctggcttattttgccctcgataaaacccggttaatagacctgtgtgatgagctgggcttgttcaaccatcaaacggggcatgtctttctcatccgcgaaattttcctgaataatcatcacattctgggtgtctatcgtgaataccttacgaaaaagcaaaattggatagaccaaaacctgattgtgaaaatccaggaaagaggcaagcgcctgacaaaatatatcctgcccaccaatcggccattgccctataagatgaagcaaagcataaacaaaggttttgaattcaatgcgtggctccagcacaaatcgacgatgcctattgatctgcccactaccttgtttgacgagagcttaactagtttattaaaaaaaaccatcgctcaaaaattaggaattgccagtaaaagtgaggacaaattcgggagactgttggaccggttattgaaacaggacacccaacctttttacaagtttgaacgcatctatagaaaacccttctctcaggaagagccggaacctttcaatattttaaagctgacacacacagcgctcaaacagcgtttcggtaagccggccgaggtaaacgaaaagataattcgtcatcatcagcgcaaagatcagattgtacgactgatgtgcgagcatctgtttaaaaataactcagaacttgcgtttgaaggggagtttttacttgaaaatcttcatccggcatctcgcaacaatccgttagatgcacctatggttttcgagcaaacgattccacatacccataaaaagattgttgcacaggatagcaataagtggatacaggaagtgaagaaaacaaataatcgtaacaaagcctggtatcgatggacactgaaggattttgggacttttcgtaaaattattcacgatcgccggttaccggcactggttaatagtattacaggtgatgaaattgattttgacttggtccagtttgaattggcggcctatgatcgtgcccgggaaacgatatttgaccagctctttttgctggaacagtttattgcggataaagacatgagttatatcaagcagcacaaagcgattgaaagaatgcaagatggaaaaggttttgatgaggtgcagttcaacacatacgccgattggctttcggataaaggattgctgactcctgatgagattaatggtttaaaagaaatccgtaatcgtttttctcacaatcaatggccgggcatttccaaacttggcattcagccgatatcccaggaacaacagtctgcatttgtcactcatctcaatataaagggttgggtgaatgaacatcatacaccactggcgatgtttatggaaaaacttgttattaattgggtttcgaaagccataacttaa

SEQ ID NO: 293 - DNA, 3426 bp, synthetic construct
  source 1..3426: mol_type = other DNA
atgggcgtcgaaaaaaataaagtcttcgaaagcgtgataatgaactttgatcaagagcgaaaatatggattcattgagtacaaagagacaaataatttgtttttccacatggaaaacgttaaaaatccgaaggaaatagtgaagggcgctaaagtgcgtttcgaaatatatgagaatcctaagcccaaaaaacagaatcagcgttttagcgctataaacgtagaggtgataaccgacgaaactcacaaagaggcgaagattcagaaaaatgagtttaaaacatttgaccagttcacgaaagaattacaggaaactcagaaagtcaatggtgaaaccaaaaaagaacatatcacaaaaaacaaacacaccaacgttaaagcggctggtgtaaagtctgtttttgccgttgatgatgggaatgtcttaattacgtcctttggccgcggaaatgcggccgatatcgaaactttaaaaagcgatgatgataaaacaatcaacctcacagaaaccgaaaaccagaaaaagtacgtcgtgactaataaacgttcgaatgtaaaaggtttagctgataatccgacaaaagttgaaagcatcattccgggcgagacccaaattgggtttaaaagtattctggaaaaacacttctttggtcggacgttcaacgataatatccatattcagattatccataacattcttgacataaagaagatcctcgccgtccatacgaataatatagtgtatgcactcgacaatattcacgagcgtgggagagaaaattcggccgaaaagccaatcgatatgataggtgcagggggtatttcgacaagtaaagaatatgaacaatattgctccgagaagagcgattacgaagataatttcctcaaacagttaataaacaatgaacgcattgcgtactttggcaacgcgttttttaaagatgaagggaacaaaaaagtaatgcgtaccgagaaagaaatctattacattctggggatgcttaatgaagtgcgtaatgtttctacacattttacagaagaagataaccgagattgggcaaaggctaatctgtataatctgagcaaccgattaaaagtgggctcaaaggaagtgctgaaccagttatacaaagagaaaatagacaagatagatgcaaacgggtttgtaaacaagggctgcaaacgggactttagtatcctgtttaagagtctgaatttgactaccgataaagataaaggtgaactggtagtcggattttacgatttcagcatacgcaaaaattataagaacattggcttttcaatcaaaacgctgcgtgagtatatgctgaaaatttcaaattctacgctttgtgcagacacaatttccaataatgcaatccgccccaaggcctataaactttatgactttatcatctggcactattacatgaataagcctgataaaatcaatgactttgttgagaaactcagaacccaaaacaaaaacgatgagaaaattaaactttattatgacgaagcggtctgtttgctgagtgagttaggacgtgagattcataccatgacgagttgtgtgcataacatcgaaaatacgagttatgaaattaccgataaaaagcagaaagaatactacaaaatgcagataaacagcctgaactctgccgataaagtatccgatttttcaaaagtgatctatcttgtaacattatttctggacggaaaagagattaacgatttgctgacgacactgattaataagttcgacaacatcgcaagtctgctttccgtgttagaaaaacaaagcggaaagaaagttgagtttgttgaaaattattcgttcttcaatagttcgaacttgctgaaggagaaaactttaaacaaatccgaaaactatacttgcaagattgttgaagaattacgtgaaatcaatagttttgcacgcatgacaggcgactgtaaaatccggaaatcagcttttgaagatgccagccagctgctcggttatcacgataaaactgttaataacttgtttgaagtactgcggctgaaagaacttgagagcaaagactggaaaaagagaacggatgacgaacaacaggaatatgatcgtctgttaaacaaacaccattacttcaaatccggaaaaaaacttcctgataccggtctgcgcaacttcattattaacaacgtgattgaatcacgccgcttcaattacattgtgcgttatgcggacccgaaaaaaatacgcaaatgcactgagaacaatgagctcttgaaatttgcctttaaagatgtcccggattctcaagttgacagatattacaatatttgcgttaccaataaaattacgaatgctacccgcgaagagaaaattgaacgtctggtggacatcattaagagtatgaatctgtccaaggtggcaacagtaaaacagcgggataagcaagacaatgtagaaaagcagaaacaacttgcgattatgtcgctctatctgaatatcctctaccagatagcaaaaaacctggtttatgttaattctcgctatgttatggcgttccattcactggaacgagactctcaaatgttgtttgatgcctattatgatgtaaaacgcggttattgcgatctgtcaaccgtgctgctgtttggcgtcgatgatctgcagaatagaaatcgtggctcctataagtatttgagagataaccggcggagcaataaagatgtgatagaaaccttcggtgactttaaaggaaaagtttcaaaggttgttgagaagaaaaatcaaggcttaacgaatgaaatctatgactcgttatgtaatgtcgcgggcactaccaagactgaggtccagaacgaaattaaaagcattttaaaaagtaatggtttggacgaatcggcatcttcttatctgagccataaacttgttaacaaggttcattcttacaaataccttaaacaaaaccttgattgtgcggataatactatgattaaccaatttcgaaacaacgttgctcatctgaatacaattcgtaatatggatggtattgagaatgtcaccggtattacctcttatttccagatctaccattatcttatgcagaaagccttgtataaagagtttaaaaagtgtagagaaaatgccgtgcgtaagtggatcccgtacataactgaaaatgccgaacctaagtatgtatattggaacaagaaagagcagcaggaagttgaggtgtccttcaatccaaagattttcgggtatatggaaaatatcaaaaatcattcaaacacctactgcaaagattttgtcaaagcattgtgtgctccatttgcttacaatcttccccgcttcaaaaatctttcaattgaagagctgtttgatatgcacgagctttcagaagaaccaaaagagtctatgaagttaacggactaa

SEQ ID NO: 294 - DNA, 3279 bp, synthetic construct
  source 1..3279: mol_type = other DNA
atggaaaaatccaagttagataacgagatgacgtttgcagaagatgcatactactttgcacattacgccaatatggcccgccacaatgcgtatttgattcttaatcatattaataaaagcattttcgggaatgagtcaactctgaaagaagaaaatcttcaaatcgcgattatcaaaattcttgatcctaaaaatggtgctgatcatcatgctaaagcgattaaactgttaaaccatcacttcccattcatcgcctgctattataaagaagatattaagaaagccgttgagaatagtgcctataaagaaatgaacgataagaagttagaccatcttaaagaacccctcaccttgaaacagattttaaaaacgttaaccgggatccgtaatgaattaaaccattacggatatagtcgcaaagaacaccccatccctttttttcaggatctgtttaatgacagcatacagctggcgaaaaaacgtatgattgaattcaatgaaacccggtttaattccatccaggattcaccttaccataaaatggtcgatccgaaagactcggttttaacagatacaggcaaactgtttttcttatgcctgtttctggataaaaaaaatgcctttgaaatgctggctaaagtcaagggattcaagaatcgaacagacgagaaatatagagcaaccctcgaatgttatacccaactgtgttgcaaaacaccgtacccgaaactcgaaagctccgatatttctctggatatcctcaacgaattaaaccgttgcccgaatgcactctaccaagtactgagtgaagaagataaactgaaattcaaaaaagaacccaacgaagaaacagcggaagagctgaacccgattatgaaacggtatgacgatcgatcggcatatctcgcacttcgttactttgatagaacgaaatgtctggataatattacgtttcatctccaattagggcgtaaagttatgggcgaacctcataagaaggtttttgatggtaaagaacgtacccatcagattctcaaagagatgcgcgttcacgataaactttccacttatgaaacagaagaagcccaaacattctttcaatcaaaaattgaatcaaatgaagtagaactctttgccccacactaccgcatggtgggtaatcgtataggcttgtcttttggtacgccatcagaaaaaaaggaaggctatagtattcctataaacaatcagccggcacctcaggcaatccttagtaccagtgaactgggtgcactgtatatctataaccgtctgtataaagagaacaaaattacgcaatctccgaaaaatctgatgtctacttatctccagacaatgaatagattcatcaaagattggaagaacgatggtatcaagccggagactagcagcaacaaaatcattaaagaacgaaatcaggaacgcacaaagcagacgattaatgaactgaaacgtcggacagaccatcttcaaaaactgctggatgagaaatatgcgggattaaaagtcaagcaccttccggatatttgcagagaacatctcctgaattatcaatcggacgataatattcagcaggcgatcgactttcttaaaaaaacactctctgacacgaatttcaaaaagaaacaattggaacagtttgagcgtaacatggtttaccgcagctcgaattcaaaacagctcaaaataggcgagattgcgcaggaattggcccgggacatcgttttctttctcaaaccaataaagaaagagatcaccaatcgaaacaaagagaaagtcactgtttttcagaaaataaacaatcaagactttgacattttgcagaaccgcttggcttatttttcactttacaaagaggaactgtgttctttttttgatgatcttttgaaaaagaaacacatgaaacacccttttttggaaaatgtaaaagcagaaaccaaatggtccaatggcctgatagaattttatttgaaatacctggagcataaactgaagtggttgaatacgtataccaagaatgctccaaataacaccactcgaccaaattatacgacttcaaatcgcataaacaaaaaccgcagcactccaaataagaaggatgagatagaagaaaaggagatcgatccggagaaaataaaagagacattcatcgaaaaatacaactatttcttgaaggtgaaaaccagttctcccaaaaactatcagggtaaagcgatttttattccggtggggttattcaacgatgccatcaccaaagccatgaaagagagtggttatcaggtggaagatgacgagaagactcccaatgctgcttattggattaagagttattttcatggagctacccagcccttttatcaactgcctcgctactataatcgggctaagaaagatgaagagcgcgacctggtagaagctgcgttacttaaaaaagagataaagaattactatgtgaaggcaaacaaaaagacacagaacgacttcaaacagctggcaaaaagaatcagaaagcaagaggaagagattctgactcagcagacctcggatcgcgtactgtttatgatggcgacggacctgctgaacggtggaagcgacggccgtcagacgattgagtgtgaacagataaacacattaggattcaacttaggtgaaaacaagattctggatgagaatcgtaaagtgtccatgaatatctacgggcggaaagtcgtttccgaacttccaattaaacgttacggtgaattcagacggtttatgaaagaccgtcgcctggagaacctgattaactatttccctgaaggcaaggacattgaacttggggtgcttaaaagtggtgaggtggaagctgtaggcgagcgcttttcaagctcaactttagccaatgaactcgaattttttgatagccagcgttggctgttaatgaagtctatatacgaatttgaaaagaagatctatacccatttcttcgatgttctgactaaaaatgtgccggaaaaagagatgatggaaaataactatatcgcgcattatcactatatagagtgtgccaagaagctggaactgtctgtctctgagttggaaaaagatgattttaaagagttacgtaacaagatacagcacaatgagattccgtactcccagtggattaagaatcgcatatcgaccaaagatggccatctgattaccaaacaaatcgtggagttagttttgagcatctatcagcaaatgaataacgaacttgaccaattaattcggaaataa

SEQ ID NO: 295 - DNA, 3459 bp, synthetic construct
  source 1..3459: mol_type = other DNA
atgaaccatacgataggtaaaggaatttcttataatccgtttaaacaccaagacaaacactactttggtagcttctttaatcttgcggataacaatattaaagatgtattcaacgaaattgcacaacgcctgaatcataaagactcaaaccctaaaaacattattaaccattacactgacaaaaacatttcgcttgttgatttcgagaagtttgttagtttgctgtccaattatttcccgattgtgaacgaaattgaccagattaattgtgacgccaaaggtagtaatggtaattataagcctaaaacgaaagaagagcgcctgggctacttcaaaaaaactagctattcattacttgaggctattgataaactgcgcaattactatacccattatcaccatgaaccgattgaaattgatctgaacctgtttccatttttagaccatgtgctgctcaaaacggctttaaacactaaaaaaaattatctcaaaaagggcaagactaaagagctgattaaagataatctgaagcagcagttcgatttcatcttcaacattaaagtcgaggaatatttgaaagaaaaaaacccgacttcgaaaaaaattgaacgtgctggcgggaaaatagagaattttaacaaaagcctcgttgaagaaataacatctgcaatctacaatgatgcgataaaagattttatctattccaaaggtgaaaatgcagaactttccaaccgaaaaaaaacatcgtttagcgacaaggattatttctactataatgatgatgaccacttcagtttacctatttcttcaagcgggattgtttttttattgtcatgttttctcaatcgtaaggaaatcgaaagtctgaaagacaatataactggctataaaggtaagattccaaacagtgaactgacattgaaacataatggtattcgttttatgaccactcaccgcatctattctcattggtgctacaaaggtctgaaaacgaaaatcagaacctcagaaaaggccacacgtgaaactttattgctccagatggtcgatgagctcagcaaagtgcctgacgtcgtatatcagaacataagtgatgacttaaagaagaccttcatcaaggatctgaacgaatattacatagataatcaagagaaccaagagaatctttacaactcaaaagtggttcatccggtcattcgtaaacggtatgaagataagttcaattacttcgcggtacgttttctggatgagtttttagattttcctacgttgcggtttcaggtgcatctgggcaattacctggaacattctacgtcaaaaaacattggaaactcgaaaaccaatagagagataaaaaagaagatttttgtctttgggaaactcagtgaggtgaacaagttaaaaaatgatttctttgagaagaataagcaaaatgataccagctggcagttttttccaaatccatcgtatcatttccccatggaaaacagtaatgacttaaaaaaagccaataagatcggaatctacattaaccatgataagtctattaataagttcaaacatcagacgcagaaacaaacacatgaaaacaaaatcaaactgatccaaaaggtgatcggtgataagtcgaaaatcaaaattggtcaaccgattgcatatctcagtatgaatgatatccactccatcctttttgaagccttaaagaatccgaaaattaaggaatctgggaaaatcgacggggagcacattgagtataagataacccatcagatcaataagcagattaaagagatacaaaacaaaaacgagaatgcaaaaatcataaagaaccagcagtcaaaacaggagacagactttaacatcgataagctgatcaaagatgttaacaaggaaatcacaattagcgaggacaaaatccagacattgaaagaaaataaaaagcagtatcagaattaccagcgcagcaaaaaatccgaaaaacacaacaattccagaaaacgcaaccacatcctctataattctgaaaaaggagaaattgcgacttggcttgcgaacgacatcaaacgttttttttcaaaagattttaaagataagtggaaaggacatcaccatagtaattttcagcgaaatcttgcttattacaatacccaaaaaaaagaagttgaattgcttctgaaaggcttggattatcgcaaaaccatacccatgctggacttctctaagaattcgtttctggatttctatagaaagtatctggaaaaacgtaagcagtattttaagaatttgttgagtgaacttaagaatcacaaaagcggcaaacacgatagtattgaaaagcttaagaaaaaatgtttcacgcacttcaaaaagcggaattatcgaaacaaaaccatcgaagataaaatacagaacatgttagccaatcccatttttattaaacgtggctttatggatactaaacccacaatgataccaggcaagaattttaatcaaaataaaagcgattttgctgattggttcgttgcgtttaaagaattttcggaataccaaaagttttatgataccaatctttatccgattgatctgagccagaaatcaaaatctgcgacgaaaaagatcaacactgaaatatacaaacagaaaaaaaatgattgggcaatttggcagatgacgaagtatattttcaaagacatatttcagcaagactcccaaaacatttccctgtctgaaatataccagagtagacaggaaccgatatcaaatgccaaaaacacagccacggacaaacgcaaacagaatagcatttgggacagcacaattgatcttcagctgaatcggaagattaaaatttccgatgtaaagctgaaagatattggcaacttccggaaatatgagaatgatcagcgtatcaacacctttttagactatggagatttttccgattggatggcctatcttcccaataattggcaggaaaactttgaatataaaccgatcaacgtcattgatattcagttagacgattatgagaaaatacggcaaaatgttttattgcaagaggtgcaaaatcttgaacgtgagatctacaacaatgtatcaaataaaaacgaaattttagtgcaggacagcaaagggaataaaaaccctaattttaaagcgtacatcttaaagggtttactgaaacaaatcaaaaatctggacatcacaaactttaaactgccacagaatgcaaaagaatttgatacactgaccttcaaacatctccagacactgtctgtaatagagcaaaaaacgaccttgctgatactgctgcgcaataagtttgcacataaccagctgcctaataaagcagcttatgaattttgccaaactattttagagcgagaaaaatctcagacctatgctcattactattcagagttattcaaaaccctgaaaaaagagctgaccgacatttga

SEQ ID NO: 296 - DNA, 3441 bp, synthetic construct
  source 1..3441: mol_type = other DNA
atgatggagaccattaaacaggaaattggcaaagaatacaatccgtttaaaacagaagacaaacactatttcggtgggttctttaacctggcggataataatatcaaagaagctttcaacgaagttagtatacgactgtcccaaaaaggagcatcgccaaaaaccctgattgaaaaatatacaaaagaaaacgtgtccttagtggactatgaacgcttcgtcattcttctctcggattacttcccgatcatcaaagaaatagatcaaatcaataaagatgagaaagacaacaaaggcattctgatccctaaaactaagaatgaccggattaaagatttcgaggtaattttggtgtcaatgatcgatgccattgaaaatctcagaaactattacacacacttttatcatgagtcaatcgagatcgacaataaaatgttttattttcttgataaggtcctgttcaaaaccgttttagatactaagcgcaactatcttaaagaggataaaaccaaggagatgattaaaaacacgcttaaggaagacttcaataagatttttaacctgaaagtagacgagtatctgacaaaagacaatctgacgtcaaaaaaaataaaaaaggcaagaaaatacggtaatagtttcgatattggtctgacgaaagaaatcacggcatcaatctataacgacgcgataaaatatttcacatacgataaaaacgagaagtcaatattatccgattcacgcaaaacggcctttaacgaacgtgattatttttatcgggacaaaaattttgatctcccaatttctagcagcggaattatatttctgctgtcttgttttttgaaccgcaaagaaattgaggacttgaaatctaacatcaaaggctataaaggcaaggtaactaaaaacgaagagccgactttagagaaaaatagcattcgttttatgacgacacatagaatctattctatttggcactacaaagggctcaaaaacaagattaagacatcggaaagtgcgacgaaagaaactctgctcatgcagatgattgatgaagtaagcaaagttcccaatgtggtgtatcaaaatctttccaaagatctcaaagatagttttatcgaagattggaacgaatattacaaacacaacgaagaaaataccgaaaatacaattaactcgaaagtgattcattccattgttcgccgacgttataaagacaaattcaattattttgccattcgtttcctggatgagtttgttaattttccttcactgcgttttcaggtctatcttggaaattatctggtagattcccgtcccaaagaaagcgcaaatgtgattaccgagcgcgaaataaagaagaaaatctttgtttttggtaaacttaacgaagtgaaccagttaaagaacgactttttcagcaaaattgaagaagataaactggagaccaatttggaagttttcccgaatccgagttatcatttcccgatggagaatagtgaggaattgaaaagtgctaacaaaatcggaatctatctttcagatattgagaatctgctggaacccttcaaaaaacacctgaataagaatactagtcaagaaaagatatcgttaatagaggatatcacgcaacagaatgagaatatcaaaattgggcagcctttggcgtatctgagtatgaatgatatacattctgtcatttttgaggtgctgaaaaaccccattattaaagatggcaagattgatgggaaaagcgttgaaaagaagataaaaaaccagatctacaagcaaatcaatgagatcaagaacaaaaaggaagaatccaaaatcattaaaaactttcgcaaaaaaacagaaagtgaccttgaccttaaaaaaatgattgatgatctgatcaaagaaattaaaatcaccgatgacaagattaaaaagctggatgaaaacaagaaggaatattttgattaccagaagaataaaaccgctaaaaagcggaattacatcttacagaattctgaaaaaggagaaatagcaacttggcttgccaatgatataaagcgcttttttcctaaagaattcaaagaaaaatggaaaggttatcatcatcgtgagttacagttaagcattgcttattatgatacgcaaaaacaaaatgtcaaactgctgttgtatggtctggactatagaaaggaaatcccaatgctggatttttctaagcctaatttcctggatttttatgagtattacttgaaaaagcggaaaccacaattgtacaatcttttatctgatcttgaaaaactggaaagaggcgagtccattaacaaagagatgcttctctcgaaatattttaagctcttccgtaaaagtaactaccagaacaaatcattggatgataaaataaacaccgcgttggcaaatccgatttttattgagcgtggttttatggacggtaatcctactgttattccgaatactactattaaagggaatgaaagccgttttgccaattggttcgtcgcctataaacagtttgacgaatatcaaaaattctacaatacggaagagtatttcttagagttaaaggacaaaacgccaaatgaaataaaaaagatacagtcgcagatctacacacagaaaaaaaacgattgggccatctggaaaatgatcagctacatttttaaagacatttttaatcaggatctgcagaacgtaagcctttcagaactgtatcagaatcgcgagcagcgtttggagaatgaaaaaaaatcaaaagaaggtgagcgaaaacaaaactttttttggaacaaaaccgttgacctgcagcttaacaataaaatcaacataccggaagtcaagctgaaagatattggcaattttcgcaaatacgaaaaggacgaacggataaaggtttttttatcttataatgatattaccgattggatggcttacttaccaaatgactggcaggaaaagcatacaataaagcctatcaatgtaattgatatacagattgataagtacgagaaaattcgacagcatcatctgctcaaagaggtgcaaaatctggaaagcgaaatctataataaggcgattaacaaagaagaacttctccaggaagacataaagggcaacaaaaatccgaacttcaaaaagtatatcgtcaatggattactgaaacagataaagggcctgaatgttgagaactttaaaattccgaattccgataaagagtttaacgcattatctgaagaaacccttagatcttacacagaattagaacaaaaagtgacccttttggtattgattagaaataagtttgctcacaatcagctgccaaataaggatgtttatgcgtttacccaaagcatccggaaacgtcagaagaatgaaacttatgcagaatactacttcaacttatttgagaaaattcgcggtgagatataa

SEQ ID NO: 297 - DNA, 3027 bp, synthetic construct
  source 1..3027: mol_type = other DNA
atggatacaccaaatttctccgaacgtatacctgtcagtttacagagccacccatattattttgcacactatctgaatatggcgcggcacaatgcgtatgtgatccttgaatatgtgaaccgcgaacttattaagccaggaaaaaacctggacgaagacaatcttattcaatctacagtactcaaggatggctactttgatcgtaaacccgatgagttatctcatcgtaaccgtttattggttcagcattttccgtttctgcgcgaagcggaaaatgagggtgcaagaacctgtaaccctgtttcgtacaaattaaaaacggctctcgctgcgcttaaccaatggcgaaataatgccagccattacccactcaatcaaaaccatgaaaaggattttgaccttcagcctttttttagttttgccattgaagcttgtaaaaaacgaatgcgcgaggtgtttcaacccgatgatttttacctgctcgaaactaatgagaaacaattttacaccctgcataacgagaatggttttaccgaaaaaggactttactgtttcatctgctttttcctggagaagaaatatgcttttcagtttctggccgggatcaaaggattcaaaaatacgacagacaataagtttcgggccacactcgagacctttaccgaacattgctgtcgcctgccaaaaccaaaactggatagttccgacatcaagctcgatatgctgggggagttatcacggtgcccggccccattgttcgacttactggatatagaagagcgcaagaaattcatccgtgagccggaagaagtaaaaccggacgaatcaggcgaccgggaagaagtacagcaggttttaatgaaacgttacgatgaccgtttcccctattttgcgctccggtatttcgaagagaagaatctgctgaaagggattagctttcacattcatattggccgctggataaaaagcgaacacacaaagaaaataatgggcgccgaacgcgaccgtcgtttattgaaagacatcagaacttttggggaactgaaggaattttcaccggagcatgcacctgattactggttaagagatggcattactcctgatgatgttgaccagttttcgccccagtatcgcattgtcgggaaccgtataggtataaagcttaattacaatggtcataaccgttggtcagtgcccgataaagagatcaatgtaaaaccggatgcaattatcagcacgtatgagtttttaaacctgttcttatatgaacacctttatcagaagaaacttaccggcctgtccccggcagaattcattcaggattatctcgaccgttttaacaattttttaagtgaattcaaagcgggtcatatacgccctgtcggcgattttagtcttgaaaaaagacgtgggcagggtgatgagcctgatctgactgctcgcagaaaaagcctgcaaaaagaactggaccgttttgttttgaaaggaaaagatctgccagataaaattcgtgagtatttgctgggttataaacaaaagagtgagaaaaagcaggccaaatggattttaggcggtatgataaaagaaacagtctattggcgtaacaaagcagagcagtctcctgaaaagatgcgttctggcgatatggcacagcagcttgcgcgcgatattattttcctgaccccgcctcatacggttaaagaacacaagcaaaagctgaattctttggaatacgatgtgctgcaatatgcgctggcatatttttcttcgaatcgtgagaagttatattccttctttaaagagcatcaattaactgtgaagggggatcgggctcatccgtttctgtataagatccgcttggatgagtgccagggaatactggatttctttattgtgtatatgcagcagaaagaaaaatggcttggttggcttgaccggaacctgaaatctccgcgattaaacgaagaggaattcttcaatacgtactcctattttatcaaaactgataccaaacgggcaattgagatggattatgaaagctgtccgaattatttgccacggggcatttttaatgaacccattgctaaagccctgcaaaaagccggtgtgaaaataaaagatgaggataatgcatcgtatgcgctttctgtatacagcaatggcaagacgcagcctttctataacaaagagcggtattacaataaaggaattttccgtatggaagagttgccggaaaaattgcaaccgaaagaattacttggcaaaattcagtggacgattaaaagttccggtaaagatacggaagaatttcgctcacttcagaatcttaaaaacagaatattgaatactgaaaaagagatccggtatgtgcagagtaccgatcgcgccctgtggatcatggtcgctgatctcttccctgaaacattcgaattacgcccggacgatctggaatgcatcggtcacgacctgtcagacgatctcttgtcgcgcccgtaccaaatgaaagaaaaagtttacaactataccatcaccgactatctgcccatcaaaagatatggcgaatttcgtagatttttgaaagaccgaagactggagaatctcctgacgtattttgaggaaggtgttccattgcatcgagaagcactggttgccgagttggaagcttacgacctgcaacgcaaaaacctgctggaaataatctatcgcttcgaaaaactggttttcgatagacaccggcatgagttaacattttcaggggaaggagaaaatcagtacgtcaaccactgggattacctggactttgttgcccgaaagtatggattgagcgcagaggtaaaggaactgaattcagaacggtttactgagttgcgaaacaagatgttgcataatcagattccgtatcagttatggattaaggaagcgattgctgcgcgtgaagagaacaccgtgtgtggtcgtattatgggaatgatcggtgaaatctacgaacgcatgacaacagagattgaaaaacagatgcaggtataa

SEQ ID NO: 298 - DNA, 3192 bp, synthetic construct
  source 1..3192: mol_type = other DNA
atgtttgataacgaacaaaagaatctggaaaaagaaccttactggggagtatttctgaatcaggcacgtttaaacgcctatattgcactgcgcgatatttcggaacgattggaagaaaacgctgccgatgaggatagccttagtgaatggccggtcttgaagtatcttgacaatgatacagatgcggtcaaatcccgccgcatttttgatctggtggaaaagcatttctcaatgctcaaaattatctatggcggtgagaaagaaggcgaccttgtaaaacgttcgaaagaatataagataatattaaagtgcctgtttagagcgttgaacttttatcgtaacaaattttgccacatgtattcaggcaatagagctcggaagtataatgagaaagaactcattaagtatttggaagattgttttgacgcatctgtgcgcaaaatcaaagaattgcgtcgtttggatgaaaaagatgttttacatcttcgaagaaaaatcgcggaaggcaaagacgcgaacaaacgcgttatcgataatccacaatttcgttatcctttcaaaaatgagaaaggagaactcaacgaaaaagggctttatttccttgcgtctattttcctggacaaaaaagaagcccatgaattcttaaaaaagcaggaatactttaaaaacgacagcgagcctaagtatcgggcaacgttagaaagtttttaccactatagaataaaactcccacgtccggttatcgaaagtgacgtggataaaaatggtcttgcgttagacatgctgaacgagcttaaaaagtgtccaaaagaactgtttgacctgctctctaaagaacagcaggaaaaattccgcgtagtggattccgaagacgctgacgaagagggcaatgaaatcctgatgcgcagatattcagatcgttttccttatcttgcgctgcgttattgtgatgagaatcaggtgttcgagagaattcggtttcagatagatctcggccgatattatttcaaattttacccaaaagaaactatagatggtaagactcaacaacgttctctggacaaacgtctgaaaatcttcggtcgtatcaaagacgtgaaaagcaaagtcgagcaagaatggagtggtataataaaatcgcccgataccattgaggagaatccaaacgagccctataagctgaaaaccacgccgcgttataacattgtggataatcagatcggttttgtcatcacaggcgacaaaaatcttccggatgtcaaacgacccgatgggagaattgaattagaaaaaccggacggttggctgagcatctatgaattacctggcatgttgtttcacggattaaaatacggttttgataaaacagagagaatgataaagatatacatcgaaaaacaacggaagatttgtaaggaaatttgtgaaaaggggacaattacaccggatgatggcgaatccatgcctgaagcactgaaaggtggggcaaaggctgctaaacgcaactacagcgagaaaaaactcgagcggatgttacaagatactgaacagcgaatccgagccattcaaacgacacagaaacggatggacgagccaggcaataagccgggtaaaaaaaagtttttcgatatccgcgcaggaaaattagcggattttctggcacgcgacattatggcgctgcagagattcgacccggccaaacacggtaaagataagctcaccgccattaattttcaggtcctgcaggcaacccttgccttttacggggcaaaaaaagacgttatcgaggatatgtttaaaggtattgggctgctggaaggagataatccccatccgtttttgaatcagattgatccggctcaatataattcaattgcaggattttatcaggcttatttgcaaaagaaacgctcatacctggaagattacagaaaagaggaagaatacgacgagcagtttttacgtcccaaacgtcagcgttatgcgcaagaaaaacgcgagatcaaaaccgttgcacgtcagctgctcgataatcctgtcaatgtacccaagaattttttcaaaaaagagattgaagagttcgtttttagccaggatccgtctctgaaaaaatccaaaatgaatacagcctatatgatccaggccttgtttgaaaaacattacggccgccagcagccgttctacagttataatcgcacctatccggtggtttcaaaggcgatagagtacggcaaaaaagggaaaaacaaaaagatcgccaaagtacttatggccatagagcctaaactgaattatatggaaatcaaaaaaattgtaaacgagatgccagacggccaatatgagccggaaaacctgaaaagaaacctgtacgagggatacaaagattatgagaaagatgagcggataatacgccgttgcaaagtacaggacgtggttagttttatgatggttgaagaaacattaaaagatcagcttgattttaacggaaacgttctgacgctggaaaaaataaccccgtgggaagccagcccattcaaaaagcctgttttatgccatacgattatctccattccattcaacaccaaagggggtcatactgacaaggattatgttgattttatcaagaataattttgagggaagctacgattgcgaaccaaataaaatcattctgaagtacaaagtgacgtcaaaagatacgaaattaaaagatatcggcaaatatcggatgtattcgcacgaccggcggctgcccggtctgttaatatggaaatatcgccctaacgatcagaatggaaacgaaattaagttcactgaaattgaacaggagattaaggcttttgaacggcgccgaattgaaattgctcaatgtttgtatacgcttgagaagaaggtgattgattcctggttcactcaagacgagcttggtgaagaacatattcccttcaataaggtaatagacgtgattaaggctaaaatgccgaatttcgaggataagtgcaacgttctgttgaaaatccgtaacgccattaatcataatcagtttccggtctatgaacaggcgattcaaaccgcaccaggtaaggaaattgcgggtaagatgctgcgtataaccgaaagttacattgaacagattatggcaaaaatcgatcctgattttgggcgtactgaagatgctgagtcttctcgctaa

SEQ ID NO: 299 - DNA, 3951 bp, synthetic construct
  source 1..3951: mol_type = other DNA
atgccaacgacgaacaatcagaaaaagaaagcagattctatcaaacgaacgagcccttccccgtcgcgcattaatggggtagcgaaaccgcgccccctggtagttgatgaaaataacaaacatgtgctcgggggttattttggcctcggcttaaacaatttctacaaggctaccctttcgatattcgcgcgcaccggtatcaagatagcctcaaaaaatggtacagttctttatccagaagaaaaaatagggcaagttatacgcgtgttacgccgtagcatttctgacacttccggcaatcttacccacgaagaaaaagtgtggtcaaatgcctttaagctttcatcaagccaggagatgcgcctgcagaagctgattttccatcactttccaattctgggtccaatcatggcggacgaaggtgcttataaagcctctactaataaaaaaagtaaggttaccgacgcgtatagtatgacctatggtgtaacacttgaagagtgcctggatgttttaggcgaccttgcacagacgttggtcgattgtcggaatagctacactcatttttacccgtataacagtaaagagagcacagcagaccagttggcattacagtccaaaaccgctcgttacctggataaagtctttaccgcttcccgtcggctcgacaaagaccgtaacaatatcgacacggctatgatggaattcatcaccggctcagctagaaacctgcgtcaatatgttgaacgatatggtttttatcctaagtatgacgaaacggttacctacgaaaaggatactcggggccgtgaacggatgaaaaaaaagatgacagaacgtgatgatttcttttacaaaatcggtaacgagaaggagtgtgacggtaagcgctacacggtattaagcggattcggcttgagttttttttgcgccgtgttcctgtcaaaaacacagacgcgtaatatgttggctgatattcgcttattcgaaacatcaccgtatcccaaagaattagacgatatcattcgcgatatgatgagtatctatagaattcgcgctccacgcggtaaaaaaaagcttgaagcggggaatactggtgtaactttggccttagatattctgaacgaactgcgccgctgcccacgcgaactgtatgatgtgttaacaactgaggggcgcaagttttttgaagatgaaaccgatcgaactaaagatgcgtttgttccggatgatgcactgtccccgtataccagcgccgacaatgcaagcgagaccgttaaacgtattcgttggaccgaccgatttccacaactggtgatgaaatatgtcgatgagacagaattcttcaaaaatatccgtttccaggtccgtctggggaagtatcggtttaagttttacgacaaactttgtattaatggcgaagaagatctgcgagggctgcagaaagaaattaacggatttgggcgcattcaggagatggaaagtgcccgtaaagaaaaatatggcgacatgatgcagccagttgaaagcgaaagaattcgcattgatgatgaccttgaactcgatcttctgcaatttgcggaagattctcgtgattcttcaccgtatattacagattctcgaaccgcgtataatataaacaataaccggataggcctgtattggaatgaattgacggtgaacggacggacaatcccgaaaccgggtgaccatctgcccgaccttggcctgacgcctgaagggaaagcggatgtcgatatgccggcccctatggctatgctcagtttacatgaactgcccgccatggtcttctatcagtatctgttatcgcagaatgcagaccccaatgagctgaagactcgttccgctgaaaacctgattattggcaagtttaattccttgcgccgtttattcacggatattagtgaagggcgattagcacccttaccagaggatggattagtgcgagttttagacgatcgttatggcctcactctgagagaaattccggataaactcacagactttctcaccggtaaaaaaggtgcagatcaatctaagcgtagacgtgtggtggctgaacgtacactgctggaatctctgcgtaaagcaatccgtcgtagagatcgttatgaggaagacagaaagaagattggagaaaaagataataagtatgccaaaaaagcttactccgatgtacgccatggttcattaggacgatacctttcagaatccctcatcgagtggcaacctactttggaaggtggaaaagacaaactgacgggtatgaattttaataaacttcaggcagagctggcgacctttaatagtcctgaaaaatatacccggctgcgagagactttatcggcagcggggatgttgtcaggcccaattgcacatcctttcttacgcaacgttactaatcgtaagatccggaacattgaagagttgtatcttatctatcttgatcaggagataggatatcttaagaccctgctcaacctcggatacaaaggcggtagacgtgatgatcgcaacattgattttgaggcatcgaccctgaaaactcatgttgatgtgcgtaaacttcccttagtgaagggagagaaacgctgggaaaaacgcacgcctgattattgtcgtgaattagcgaaacgttatcttgaggttgacggaagacgtacctctatttggttgccggaaggtatttttagtaaagcaataacagaccttctgacgcgccactactctggtaacgatggcctcatggaccgcatgcgagatgactcactcaacaataacgtcgcctatctgattaacgcatttttcgaaactgtcttggatgatcactcgcaaccattctacatgtcctacgatatagataaaaacagcggaaaagaaacaccgaatcgtttcgcaagagtgtatgatctttttgatatattgaacaatcggaagatcagaaatgcgctggtgaaagtccctatgacctgtaatcagatcgcggagcggtttactgcaaaaaatcgtgacggtcgcaaacgaatcttagctgagattgatgatcgtaccgcgggaatgacccctagagatatcggttcacatgccagtctgaaagaggccaaagaggctatgcgtcgcagactgacccacatgatcggggatgtgaaagataatgaacgttgtgtacggcgctataagacacaggacatgattttattcctgatggcgagccaactgttaggggatgctatacgcatggaaaaaattgacagtttagacaagtttcgcctgagtgctgtctgcaatgcaggctttctgaaccaaacgatggattttgagtttccggttcagatggatggcaatgtaatctacatcagacaggacaatatgagcttgaaaaactacggagagttttaccaattattaagcgacgatcgtctgccgtcactgttagagaaactggccgatggcggctctgatcggatagattatggtaaccttatgggtgaactgaccagctatgacctgcatcggagccgtatattcaaagccgttcacatgctggagcggcgcgtaacgagtgaccggcagttcagaatatttcttaacaatccgtgcgatcgtagattttacatcaatgacgatgcgtctcggatggcgaaacgcaataattttcggtctctgttgatgttgttagagcagagcgatactgcctctctgacggagtcggaacgtaacttgattatctccatacgtaatgcattttcgcacaaccattactcgattgatctgccgcgtattgcccccgagaaacggttaagaaaaactacattactgaataaagatacacgtcctctgggcgaaaaaaaggcctctttgacaacaattgccacactgattgctgcgcggctcgaagagctccaaaaaaaattggaatcaaaacattaa

SEQ ID NO: 300 - DNA, 3204 bp, synthetic construct
  source 1..3204: mol_type = other DNA
atgaatttcgaggagaacggaaataagtatctgtttggggcattcctgaatactgcgtatgataattacaacgaagtgataagtcatatctatgatgtcattcggagaatcacaagtaacaacccgaccgaacagataagctcttcacaggcgctggtatccgcagaagagcaaacctcttccgacgagaaggataaaaacaaagaacgtatgtcttttgtgtgcacgtttttgataacaggcaatgccacttcacggaaaatagagtctatgctgaaacgggccttccctttctgggacgatttgattgagattcagacttccatgtctatgcagctggataaaaccgaaagcatctttcaagttcaaaaaaattgtgtggaagaactgttcacagcgctcgaaagttggagaaactatacgactcactacattcacccggaagcaatcgcctctccaacaattaacctcttgctgaaaagttgttttaatcagggtataaaggagataaagaaacgttttaacgctcaggatgaacaactcaagcatctgtatgaagcggagttttcttataatagagaaacaaataaagacgaggtgaaatgttaccatcccgccaactactataagtttactgacgaaagcgatctgttgactgataaaggcttagctttcttcacctgtctgtttctttataaacgtgaatcttaccttttgcttaaccaattaaaaggctttaaacgggctgatgaagagcgttaccgtatgacactcgaggcctttaccgtaatgcggtttcatgcgccgaaacagctgatgaaactgcagcaacaacaaattgataaagtttcgctgggaattagtatgatcaatgaattggtgaaatgtccgaaagaactgtacgactgcattgaggacgagcagaagaaacagtttgaagtttatccgaatgccgagaccgtaccggatgaacaggaagctataggagaactgatccgttataaagatcgttacgaaattcttatgctcaaagcactggaacactcatcagagtgtaaaaacatggggttctatcttagtttaggtaagtgctacatgaaatgctatgagaagcattacattgatgggaccaccgacaaccgctatatcgtgcatccgttgtatgggtttggccgcctgcaaaatgcttcgacggatcataaaaaccatctgtcctcattcggtgaagaacttcagacgcatagccagttgcctgtatgccacttcgcaaccgaggacgatgcagctgatagccctacaagtgttccctatattagcgaatcctatccgtcttatgttctcaataataataatatcggcattaagtggcttaattcttcggaaaagacagaatatcccaattttaacctcaatgaaggtaaagtctcgtgccctacgcctgattattggttgagcaaatatgagctgccggcgatggccttttatgcgtacttaaaagaaaaacataaaaataagctgcaagagtatccctcgattaaagaactgattgatcagtcacagccggaaaacacaaaaacatcctcaaaaacgattaagagtcgccttgaagaacgtctgaaaacatacaaggttgatgcggcaaaaaaactgaaacgattagcagagaaaccggacggcgtacagagcggaagattagcagatgaactggcgcgtgacatcttatggttacaaccatcttcacctaaagaaggcggaaaagataaactgacgggtgccaactttcaggcactgcaatacgctctggcccgctatggctttatgcgtacaactctttcccgcatttttaccacggccggtttgattggcagcggtaatgcacacccgtttcttgataaaattaatcctcaggattattccaaactgacggcctactatgttgggtatctcaaacagaagatagtctacatcgataaacagttagaaaaattagcaagaggtaaagtcaacattcagtttcatcccacgcgcaaactgattaagcaaagccaaatcaacaccattgaaccagaaaaagagaccgtttttcttccccgtaatatttttacagagaaaatagaacaagccttatgtcaaattcagggtaactttaagtcgaatatcgaacgcgctaagacatcaggtaaaggagtaaacgccagcaaattgattcacttctacctggagttatatctcaaagatgcagttaccgaattctacaatattaaacgaaaatattcctgcttatgttatccactcattccatcagaaaagtataacctgaaagaatatcagaatacggaagaacgaagtgagcgcattgaccggataaaagatttttacaattttaaagaggtgaccaaaaaagcttgtaagggccaggagttatctgaagacgagaaaaagctttataagaaatatattgagctgcagaaagttatcgacaatgaaaagatgatacgcttgcgcaaagtccaggatatcactctctatctgtggatgcgtctgttcattgaagaaaatccagagcgcatagtcttcaataaaaatgatcggccggaaaatagtttgcttaagctgaaagagatggataacactatcctggatcataccactgcgagaaaaatcaatattgacaccccaaacggtaacgtgactattgaagatgaattcaaaattaaagactatggacgtataactaccctgaccacggaaaagctgcctcagagcttgatcaaattcattgggattctgaataagcctttagacaaaaaagaccgcccatcgctttcatatagctatatctatcatgagaccaatgccttttatcgataccgaccagaaataattaaaatggctcaggatatcgagaataagatcataaacgagttaaaaatcgatattcagccggaagcggaaggttactataacttccgtcaaatattagaagaaataaaagagaagtcgagtgacatcaatcttgagttattaatcaaaatccgcaacgcgttttgccacaatgaatataaggaattggacaatgatcagcataagtatctgagttcattgtttaagccgatcgcggatattaagcagacagctactttggcatacttattgcacatgctttttgaaacggaataccagaaagtgatgattctgaaataa

SEQ ID NO: 301 - DNA, 2862 bp, synthetic construct
  source 1..2862: mol_type = other DNA
atgaaaaagaaaaaagattctcacaaagcagattggcgcgatgatctcatttcaattaaacatcttctggtaaagcaggagaaagcaaaagcggcatccgccccgaaaaaacccccagcccctgttgcattgatcgacctctcccacatggaagagcagcgccgcgaattgcaggcagaagattcatcctctgccaaacctacaaagagtagcgcaaaagcggcgggcatgaaatccgtatttttattaagtgataaagaactgctcatgacctcattcgggcgtgggaacgatgccgttcgggaaatacgggtgcaaggcgacgaagtacaagccttaagagacgatccggcttaccgcatcgaaaaagcggatagtggatttgacatccatggtcgtactcctacgaaaggttatacggacgatccacgttacgcagcggaaggtccaccggaacaccgggatctgatcgattgccgaaaggccttggaaaaaatgtattttggcgaggagtgtgaagataacatacatgtacagttagcttacagtattttggatatcgaaaagatactggccgtccatgtgaataatatcgtctatgaattgaataacttgttacgtggtaaggaaaagtattacaaagattggattggttatatgggaaaatattacacctatcaagaggtgcttagaaaagagttcaaatcaaagaatgatgaaaagaatcttacgtttgtacacaacatgattttaaacgtcatgcaggataaacgtcggatgtatttcggcaaaatcttatgtggtccatctattgcgaaagaggacaatcaagaaaaaaagaagcagcgttatgaagaagagcgtgaacatgcgtattatatcttcctgattctcggtatggcgagacaaatgcttgcgcacggtgatgagagcacacgctcattgttattctgttttgatgaagaacatgattgcaataaaacaaaagaagttcgcattaagcttcgtcaaaccttagatgctgtgtattctgaacgtgtaaaagaactgaacgatgagttcattgatacctcttcaaaagacttagttatgctgtgccgtgtaatgcatgctcgaagcccggagaaaaagaaggcttgtgttcgggattactatgattttgttgttcgaaaagagtacaagaatcaggggttctcggtaaaacgcctgcgtgaaactatcattctgcgtactcctcaggcagccgtggttaatgatgcacagtacgatacagtccgccaaaaacttaatagactgtttgatttcgtgatttttgaccattatcgtaagcatgcagctgaagccgaacagattgtcgccagccttagagcagcacagagcgatattgacaaagagttaatctaccgacatgcagcaaataatctttggcaggcgatagggaaaaccgtgctgcaggacattcttcctatgatgaacggtaatgcaataaaaggcattgctgcagatccggatataaagctgtcaatgatttccgacattatgatatctgatgatgctgattatttcgtcaaattcatatatctcttgactcggtttcaaaatggaaaagagattaatgacctgctgacgacctgtatcaacaagtttgaaaacatcacagcttttatttccgtgatggaagaacagggtattttcaaagaatttcgtcaggaatattcgatgtttgacaacagcgcagctattgccaaacaactgcgcgaggtcaacagttttgcacgtatgtccatgaaaagccaggacttgggattggcagacaaactggtcatgttcgaagacgcggccgatattcttggttattcagatccccaggccggcaaacaactgctggatacgatactgaatccgtcgcagaatacaggctttcgaaactttatagcgtctaatgtcgttaagtcaaaccggtttcattatttggcctgtttttgcaatccgaaaacggtgcgcaagctcgccgaaaacagagccgtgatagactttgtgctcagcgagatcccggatgcgcagatcctgcgttactacactgcttgtaccggagcgaaagaaggcgcagatccaggggagatgcgcgcttttctggcggaaaaactgactggaatcacctttgaagagttccgtaacgttaaacagaaagatcggtttgcttcgccggaagagaaactggacaaagtccgcaagcaagccatcattcgtctgtatcttaccgcgctgtatctgctggttaaaaatatggtttatgttaatagtcggtattttttagctttccaatgcctcgctcgggacaacgcgctgcacggttacaccgataatgacataaagaatgatccagctgcctttgcccgccgatttttaagtgagccgcggcatcggaagaatagacgtgctgtagccaatatcgaacagaacatggcgaatagtgatccctggatagtgcgggaatacagaaacgccgccatgcatttgagcgcgattcgccgcatgccggagtatatcgccgatgtgaaacgtattagctcgtattttgagctgtatcactatattatgcagcgtcacctcgcggaccagcatacgcgaaaagaaggagagggtgaggaagcggtaaaaaatgaagttgtgctgcgctattttgctgacgttcgcaaatatggctcttactgcaaagacttcctctgggcgctgaatgttcctttcgcatacaatcttccacgctacaaaaacttaagtattgaaaacttatttgaccgtaatagacccggaacaaaagcaggcgggcctacaaaatctgctggccccactggggcataa

SEQ ID NO: 302 - DNA, 4407 bp, synthetic construct
  source 1..4407: mol_type = other DNA
atgaaaattatacgttcgaagggacaaagttttactgagcattcaaaagacgagtctaacactgaccatctggaacgagggttagaagcaaaacgggagcggaaattagtacatagtgaacataaagataagacgttatttcatgggcgcgaattggcccagtatgttggagaggatcatgcattagtcctgcggcaggccatatccgtactggataaagttattcgtccgccgcgtcgcctgcgtgatttcgagcttcaggcctatgttgaccgggctaaactggcgcatgagttgtggcttctggtactgaataagtgtaaaggcgacttcaccaagcatcctgattccgatgaggtgcaaaaaatatttgaaaaaacttggagtgaacgcgcacatccctatacccgtgaccgggttcaacctttaaacccatgcggcgatgaaaacggaaaatatctgcagagtcatcccaaagagggcgtgactcgccaggattttgaaggccgttggtattccgccctgtggcaggaaaataatacgaccagaaagccggattacgcaacgaccgcgcaagccattatagatcatctttttaaacaggaactgcagtttgatgggcaagaaagaacaaaatcagggcataacgacgataagaataaaaacagcggtacgccggaacccaccggaaagggtcttgtagaagcacgcggtctgactataaaggacagcgtgaatgatcccagaatgggtaaacaggtgacaaaaaatgctgatctgcgtgaagcgtcgaaagaaatagacagccactatttcggtaaggatatcgcgcaccagatctgctctgctttcaaaaatcgcagtgagaacgatctcgattttaaccctgccggcgaaatcggtgctttactgtacaaccacttgcctaccgcacttggagcagcgaacggtgatgaacatattaagagcgcgatttggaaacgccataatcaggtgcggcaattttaccaaaagctgctccgaaccaatcgctttaagcgagcattccgcactcgtgacatggataaactggataaccttctgccaaaagatactgaaagcttaacacgggttttggatgcgaaagctgaaaacgcatatctgagcgaactgattcggcttggtaaagtcattgcccatgcggctgatattccgttgccgccggtagatggggagaacttacaggatcagttcaaagcccggttggagcattttgccaccagcgcaggtcaaagcgaaattaaacgcaacgagacattcacccgcctgtggcggacctcaaccgccttatcgctgagaacgttaacggcatgggtggaacctattctcggtaccaatgaaaataacaaccctcggaattttgatattaccgataataatttccgcggcagtctgaatcatctgttaggagagaacacacgtggtgatttttcttgggaccgtattaaagtcatctttggacaaaaagcatatccagcgttatgtgatatttccgataaaggccgttctcatattttttcttcgggtgagagccaaaatgaatggcaggatcaccaggaagtcgtctgggcgcttgtccgcctggccacgcaaatacgccatggtacaaatcattttaatgttcgacatcgtcttgtcgatgagatcacaggcggactcctgacgggagataatcatccacagcatttccataacagaccgggaaatatcgttcactcatcaatgcttgagcgttttgataaactgttagcgttcgacacccgtctgcaatggcaggttctgttagacgacttgaacgcgtttagcatcacgaaatatcttaataatccgcaactgacaaccttattgcaagaactcattaaaggtcagaccggcacagacttagctacaccaaaattcatggccctgcttcgccgtgcagccaacctggcgcgggccgaagagaaagaatatggtgaggaaaaaatgcctgaagaatcggagtttctctctacaaacgcattacgtcgttttggcccgcttgaactgaccgatttgtcaaagaaaaaagatactagcctgaatgatgttcgcattgatctttttcgccatctctatcgtaccggcttcccggcttggttagaagaaaaacgcgtggatgatgattacctgaaaaacgccatccgggctgtttttgatgcccgggcattccgtgaggaagcatttgccgaagagcagcgcattgtggctcaggggacattgttagagtcttcggatgtagatgccatatctgatcttagcgcactgtttgcaaccctggcggcaaatgctgcaggtgaagaacgtctgcgccgtaactcccgtgcaagagccaaaactagagagactgtaagagttcagagtggcggcagacccgatacgaaagagaaaccgtcatggcaggccacccttagagaggacatctacggtcacctgtttgcagaatatttgaatgaagagcacttaagctggatatgggatatcaaggaaccgcataaccctatcgcggaagatctgaaactcggcgaaattcccgatttggatcagagtaaccgagaaaactgggaaagtcagttttacacctggctttatctcgtgccgagtgaccaggtttccctgctccgtcatcaactccacaagacactggctttagatgcagcggccgacaagtcggtttccggctctgctgcggatgagcaagaccgggccacgctttcacgcatgtcgaatcttatggcgctttacactgccgtgcaggaagcgggttttgacggtaacgaacatgttgaagcttatggggaagaagcggactacattttttatgcggatcacgatcaattcaaaagtattcattctcaagatgacctcacgaatactgtgcctggcacgcgccgtgggctgcgacagatcctgaagttcggtcatctgtccgcggtgcagcgaatatacgaaaaacaccgggtaactcaggctgaagctgaagacttaatcgaactctatggaaaaaaacgtggcggagaagaaccacaaatcaacgacttcacaagccgttcaaaattacacaaagagatcgaaggcttgtgggaaaaacagcagccaagagagaaacacactaccgacaaagacattgaggataagtgtaaggcgtacaaaactagcgccattaaaatggctctgcataattttaatattgcgagtgctcgcctgactgatcacgcagatcttcaccacctgctgatacgcgtcgtcacacgtctgctcgactttacgcttacctgggagcgtgaccgtaatttcctctatctcggcatgctctgcgataagttacgcacgattgaaaaagatgaccgagggtctgttctgtcctctactctcaatcttgaattgcatcatttgccatacgttgtgaaaaagggtaaaagtgcagagaaaaaacgctggtctatctgtttaaaaatcggggatcgtcacgctcaagaatctgctgaaattggattcagtgggagtgatgaatcaacaattcagcaggctttgttacaggagtacgggctgctccgtttgtgggacgacgaaatggggttgtctctcgatgctcgggatattgagttggatctcctgccaacagaccaccgatgcctgtttataaagtactttgtgaagttggccggagagaatgaaaaggatgttgcagcccgagaaaaagcaccgaaaaataaaccaatcactgatcactcgcaacgtagcggcgcttattcatattcatataagatatcaaagaagcagatccgcaatgactttgcccatttcaatattctcaccaaagagcgtctgaatctcacctatctgaccaacgccgtgcgctccctggtcagctatgaccggaaactgaaaaatgcggtttcaacggccatcgcagatatcgtctcagacgctggtctggagattcagtggacgttggagcgggaccggctgaaaaagccgttggtgatacctagagtagtccaccacttagcatggttacccaaaatcaatggggaagatgtatccttttatcttccggctagatccgcacggtttacctcaatggtaaaggcgctgtttgatttcggcacggaaggcaatgtggttgaaatcgagaaagacggtacgggtataacaggaagacttgaatatcctagcgcgttagcggagcgctataccattacaaaaacagcaacagacgaagccggtgacggtggcgagattcccgagacaccagcgcagatttgtttaattccgtctgaaattctgacgtcgctggaaaatctgcctcaggaagaaagtaaaactatgataaaaaatagacggtaa

SEQ ID NO: 303 - DNA, 3459 bp, synthetic construct
  source 1..3459: mol_type = other DNA
atgaatcatacaattggtaaaggcatatcatacaaccccttcaaacaccaggacaaacactattttggatcgtttttcaatttggccgacaataatattaaagacgtgtttaatgaaatcgcccaacgattgaatcacaaagattcaaacccgaaaaacattattaaccactatacggataaaaatatcagcctcgttgactttgaaaaattcgtatccctgctttctaactatttcccgatagttaatgaaattgaccaaattaactgtgatgctaaaggttctaatgggaattataaaccgaaaactaaggaagaaagattaggctacttcaaaaaaactagttacagtctgctggaagccattgataaactgcggaattactatacgcattatcatcatgaacccatcgaaatagatctgaaccttttcccgtttttagatcatgtgctgctgaaaacagctttaaacactaaaaagaattacctgaaaaagggcaaaaccaaagagttaatcaaggacaatctgaagcagcagtttgactttattttcaacatcaaagttgaggaatatctgaaggaaaagaaccctacatcaaagaaaattgaaagagcgggcggtaaaatcgaaaatttcaataaaagcttagtcgaagagataacatccgcgatctacaatgatgctatcaaagatttcatctactcaaaaggtgaaaatgcagaactgagtaaccgtaaaaaaacgagcttttcagacaaagattatttttattacaacgatgacgatcacttctctctgccgattagttcttccggtatagtgtttctcttgtcttgttttctgaaccggaaagagattgaatccttaaaagataacatcaccggttataaaggtaagatacccaatagcgaattaacattaaaacataacggtattcgttttatgacaacgcatcggatctactctcattggtgctataaaggattaaaaaccaaaatacgtacaagtgaaaaagccacacgagaaacgctcttgttacagatggtggacgaattatctaaagttccagatgtcgtctatcaaaatattagtgatgacctgaaaaaaaccttcatcaaagatcttaacgaatattacattgacaatcaggaaaaccaggagaacctttataattctaaagttgttcatcccgtaattcgtaagagatatgaagataagttcaattattttgccgtacgcttcttagacgaatttttagattttccaacattgcgttttcaggtccatcttggcaattatctcgagcacagcacctcgaaaaatattggtaacagtaaaacgaaccgtgaaatcaagaagaaaatttttgttttcggcaaactttccgaagtcaataagctgaagaacgatttctttgagaaaaataagcagaacgatacctcatggcagttttttccaaatccttcgtatcactttccgatggaaaattcgaacgacttgaaaaaagcgaataaaataggcatctacataaaccatgacaaaagcattaacaaattcaaacatcaaacccagaagcagacccatgagaataaaattaagctgattcaaaaagtaatcggcgataagagtaagattaaaattggtcaaccaatagcatatctgtctatgaatgatatacattcgatactgtttgaagcattaaagaacccgaaaattaaagagtcaggaaagatcgatggagaacatattgagtataagatcacgcatcagattaataagcagattaaggaaatacagaacaaaaacgagaacgcgaaaatcattaaaaatcagcagtcaaaacaagagacggactttaacattgacaagctgattaaagacgtcaataaagagataactatatcagaagataagatccaaacgctgaaagaaaataaaaaacagtatcagaattatcaacgctccaagaaatcagaaaaacacaataactcacggaaaagaaatcatattctgtataatagtgaaaaaggggaaattgcgacttggcttgcgaatgatatcaaacgcttttttagtaaagatttcaaagacaagtggaaagggcaccaccacagtaactttcaacgtaatcttgcatactataatacgcaaaaaaaagaggtggagctccttctgaaaggtctggattaccgcaaaactatcccgatgcttgatttttcaaagaattctttcctggacttttatcgcaagtacctggagaaacgcaaacagtattttaaaaacttgttatccgagctcaaaaatcataaaagtgggaaacacgattctatcgagaaattgaagaagaaatgctttactcacttcaaaaagcgtaactatcgaaacaaaactatagaagacaaaattcagaatatgctggccaatcctatctttattaaacgcggctttatggatacgaaacctacgatgattcctgggaagaatttcaatcagaataaaagcgattttgctgactggtttgtggcttttaaagaattctcggaataccaaaaattttatgataccaatctttaccctatcgatttgagccagaaatccaagagcgcaacaaaaaaaattaacactgagatctacaaacagaaaaagaacgattgggcgatctggcagatgactaagtatattttcaaagacattttccaacaggactctcagaatatctcactttcggaaatctaccagtcccgccaagaacctattagcaacgcaaaaaataccgctaccgataaacgtaaacagaattctatctgggatagcacaattgatctgcagcttaaccggaaaattaaaataagcgatgtgaaactgaaggatattgggaactttcgcaagtacgagaatgatcagcgtattaatacctttctggactatggagattttagtgattggatggcctatctcccaaataactggcaagaaaattttgagtataagcccatcaatgttattgatatccaactggatgattatgagaaaattcgtcagaacgttttattgcaagaggtgcagaatttggaacgggagatctataataacgtaagcaataagaatgaaatactcgtgcaggactcgaaaggaaataaaaacccgaattttaaagcctacatactgaagggcttattgaagcaaattaagaaccttgatataactaattttaaacttccgcagaatgctaaagaattcgataccctcacctttaagcatttgcagactctgagcgtaattgagcaaaaaaccaccctgctgattttactgagaaacaaatttgcacataaccagttaccaaataaagcagcctatgaattttgtcagacaattctggagcgagaaaagtcccaaacgtatgcgcattattatagcgaactgttcaagaccctcaaaaaagagttaaccgatatatga

SEQ ID NO: 304 - DNA, 3351 bp, synthetic construct
  source 1..3351: mol_type = other DNA
atggaaaatactattgagatacaaaaacaatccatacgtacattaaacaatgcaccgcaatattttggcctgtatcttaacatggcgagactgaacatttttaatatttcgaactatctcgcggaaaaatttggtctggcagtgttagatgaagaagagaaaataaccatttcattccttggcgataaaggcaataaagaatacaagaccaagcagtcttacatctactttaatcttatcaagtatatgcctgtcgcaaaagtgtttgattttgaaaagctgccaaagaatgagattgacaaaacaaaaaacaattcagggaaagacttcaacaaactgtcagacacccttaaagtaatttttaaagaactcaacgaatttcgcaatgattactctcactacttttccactgagaaacaagataaacgtaagcttaagattagttccgagcttaaagatttccttaatattaactttagccgcgcgttatcgtataccaagaatcgtctgaaagatgtctttagcgatgatgacttcaacattgcatctcaaacagttgttgttaataatgataataccatcacacaggatggaatagtgtttctgatctcgatgtttttggacatggaaaatgcatttcagttcatcaataaaatcatagggctgaaaggcacccagactaaagcctttaaagctaaacgtgaagttctgatgacattttgtgtgaaactgccacacgataagttcgtatcggaaaacccgcagcagacattttcgttagagctcatcaatgagctgaacaaatgtccgaagctgctttacaatgtgattacagaagaggaaaaacagattttcaaaccgcagattcaaacagaacagattgagaacattatatccaacagcgtcccggataccattgatgattacgaaaactatatcgagagtataactaaaaaagtgagatacgaaaatcgcttctcctattttgcactgaaatatattgacctcaaagaactgttcaaaaaatggcggtttcaaattgacctgggaaaagttgtattagacaagtatagcaaacagctgaacggtaaagatgaagtccgcacggtcactgaaaatgcgaaggcttttggtcgtctgcaggacttttatgatcaggaaaagatcctgaacaaaatcaacatcggggaaaataaaactcggttttatcagttcgccccacattataattttgacgtgcagaataataaaatcgggattagtaagaaagagacgacggcgaaattcatctcaaagaacacaacgcacaaagttaagttcaatttgctgcaaccattgcctgaggtttttttaagcattcacgaattgccgaaaattattcttctggagtatcttgaacagggaaaaacggagaaattgatcaataactttataaagctctctaacagtaccatcctcaacaaaaaattcattgaaacgatcaagtacaaactttcagatcttgatgtctttcataaacgctccatgggtagaaaagaaatttctgcttatcgcaaagacattctgaagtatctgatcgcccgtaaagaaaaactcaaccagattttgtctgaacataacctgagtgttaaacagatacccactcgcatactcgattattggttgaacattgcagatgttcaggaaaaaaccgccattagtgatcgaataaaacttatgaaacgagattgtatggaccgtttaaaagccattaaaaaaaataatgcgccgaaaattggagagatggctacgtttttagcaaaggacatcgtagacatgctgatatctgaaggtaagaagaagaaaatcactagcttttattacgataaaatgcaggaatgccttgtactgttcgctgacaaagagaagaaagaattattcatatcaatatgcagcgagttaaagttaaacgacgccgatggtcatccattcttaaagaatatcaatctcagtgatattagatatacctctgatttgtacaagatatacctgcaagaaaaagccgataatcggaatcagcgtaatcgtaccgatacgtcttggctggctaaaaacttttacacgttgaaaaatgttgaggtgttcgataaaaaacagcaacgtaagatttttaagcttcagaccattgttgaattgccgcaggataaaagtaaaattccgtttactattcgacaattggagaaggagaaatcaagctttaataagtggttagaatatatcaccaaaggtaaagagaccacagataagaaaaaacccgtgaatctgcccgcaaatctttttgatgacacgttaaaaaaactgctgaaaacagagttgtcaaaaaacaacatccaatacaacaaagaagccaactataatcaactttttaaaatatggtggaaagagtttcgtaaagacaatacccaaaatttctatactgcggagcgcgaatatactttcgaagaagaaaaattgaactttaagatcaatacgcagccaaagtttgagaattattatactcgcttcgcggagaatgtctttaataaaaaacaggcgttacgcaatgaagagcgtaaaacgaaacggaatctgccgcctattcagaaaatccatgtaattaagaagatacgcaacaaaataggaaatacggaaaaggaaattcggatgctgcaagaagaagaccgtttaatgttgttaatgtttgaaaaactcacaaaagagaatctgaatctcaaactggaaaaggttaacgagttactcaacgaacggatcgaaattaaggaaaaaatacctggtaaactgtcatttgatgatcttggcgagaaaacaataactagaaatattgtggaaacccggaaacgcaaagaatattccgtgctgcagaaatatatctttgacagacgattgcctgaattattcgaatattttaatgagacagatatactgatcgagaagatcaaaaccgaactggatgcttacaacaaagccaaagatattgtattcgatctgattttcaaactggaagaggctattattaagaaggacgaaacaggtattaaagaactgaacaaagatcaaaatggcaatatccagacaggcaatattcagcataaaccctatcttcattggctgcttaaaaagaatatgattaccgagaaggaattcaccttcattaatatggtccgtaatacttttagccataatcgttttcctcaaaagaaaacgatggaacttttcatcaaaaaatggaacgacaacaattttgcctatcagatcctggaaacttacaagcagaaaaccaacaacatcattgaaaaattaaaagatatgtaa

SEQ ID NO: 305 - DNA, 3543 bp, synthetic construct
  source 1..3543: mol_type = other DNA
atgaaaaagaaaagtaatataaagatcatgggcgttaaaagtgtacactatttcaataatgacgtaattatcgagaattcacttagtgaaaatgtcgaaattttgttcaaaccaaattaccaaaaaatagacgagttaaaaatcctgaactcaaatacgaataatcagacaaataaccgggttgaattcatcaatgataatgagaaaaaaggctttaccctgaaaaagaaagattcttcgtttgagaaagataaagcaccgaaaagtattaattcgtacgtcaataaggtaaaaaacaacagctttattcacaatgagttattcggaaacaagaataataactttattccgcagatctatagcaattttgaggatatacgtaaaatcatactgaactacattgatcatatcatctattcggtgaataacaaaattatagctaacaagtgcaaaattgaagttgatcgtttatcttttgatgatattggtatgttacctgcaaccaaaacttatgaagagtatggccagacaccggaacagcgcgaaaatatgactgatgtggttctgcccgcctttaaagaagtactgaaagataataatatcaaaacgggcaattacggtaatatcaaagttgattactggaacattgttaagtacgcttacaaaaaatctagatgtcaggaatatactatacgcgaacttagcaatgactctttaaactatattaacaataacatcaatgcgattgccgcttatagtaaaaaagtgaaagactatccgttactcaacgaacttaacttagatcgcaataagtatattattcatctcgagcgcaaaaatgagaatgaaaaaactgccattaaaaagctgaacaatcattttagtggggaagaaatctttaaagaaatctatggaatcgaaaaagaattccaggaaaaaaaggaattatacaattatctccgtatcatctctttaattcgccaatattgtgcgcattttattacgtttgatagcgaagaggattcaattaaagcccttataaacccctctaacaatcttatcaagaactttaagacatccttcataaaaaacaacgaaaagtatctgctggtactttatgaatatcaggatttctattctgagctgctgaacaaaaaaaacattaacaaggagaacaacatcttcactgagttttacaattacttaataaaagatgaggcgaaaaaccttggtatttccgttgataaacttcaaaagcggtatgtctttaatttgaatatagaggacgacacaaaaaaagcggaatatctgaacaaaatgaaagtcctgatcaagttttttattacgctcgagttgaaatacgataaggatttcaataaaaatgacagctccgatgtgaattccaaattctattatatcgaaaaaattaaaaccgctaagtacgcgaataacgaagatattatcaaagccttgagcgataagtatagcgatttttctattgatgattacaaagacgaatacgattctctctataaccagtctaaagataagatctatgacgaattatatgaaaaactcaacgttaagattgacaccgataaactttctgattatgtgattgatattcttggtaaagaagaaaacaacattatcaagaagttcacgtttgacaatctgaaagtcaaatattctaaaattgaggaagaggtgaatgagtacaagaaatgggaaaagattaaaaacaaagagaaaaaggagatttttgagaatcagatacgtgatctgtttcccgacatttttaagcatattaacgagtacaatgaggagtatgaaaaaaacttcaaaaacaagattaaactgcctaatatatccaccgattcgaagtttttcaatctcatctattttgtttctgaatttctgactactaaagacgcaaataatttgttttcaaccatattgaccaaacttgactcgattagtagcctcttaagtctgttaaactcgtatgacagtaatagcaatataataggcaatgagttcattgattacaagtttatgttggacaacaaggaaattaacattgagaacatttgcaatttcaaggatgatataaagatactgaaaagcctgcgtataaaggataatacgaaaacaagcaaagctaatattaacgacgtcgattttaacaacatctttaattcattcaacgatgcaggaatgtcactggaaaaattcaatcggaaaattgaattaaccactgaatcccaagaagatgattatgttgctaataactacaaggagttagttaagtataatgccctgtcatcctacaaaaagtccgtcaatgaacttaataataagaagtacaacaaaaaaacgttgctcgatctgaaagacgaagatttgaaagaacgaatcaataactatttgtccaccttagaccttttcaagaattataactgcgacaaaaattacataaaactggtgaaagaagccgtgaactacaaaaaaaaggaaaaacctttgaaacaataccttcgaaattctatctattcgtcaaaacaataccaatacataaaggattatgcgaatacacggctgtgcaaatacatcattgcaaacgaaaaaattctggactatatcttaaacgataagtttgatacagaaggcatgaaaaaacatctgtatcgcgtatatctggattacaaaaaagaggagattactaaggacaaaattgacaacaattacaataacgtgaacattaatgaactcaagaaagcccttcaggaaattaacctgaaaacgctgagtgataatattctgaagaatataccagaggacagaaatttgaaagcaattataggtctttattttgaggtatgttacattgtgattaaagggttgtatgacgtgaattccgcctatatgatacagatacaggaatatgagaaaatctacaaaaaatgtttcggagcgagcaatttttcattcaacaccgaattactgaagaagtttgaagaatatgaaaaaaatcgaaacccagaatcaaaaagtctgaaacagatcaaaggaataattggtgatgggaaatttggtcacgaatatgtgcgtgaggaaacagatgatgatgaaaaaaagaagaaagcactgatctatattcgttttcgcaatacagttgaacatagctcattgctggcgaatagtgacatcctcaaaaactttaatgaggacgaaagctttacgaaaaacgaattcaaaatcacaagcatgtttcaactgtaccacatcctgattcagcgtttactgaaaaaagacagttcaaataacaaagacaaagatggtaatcctaatccttattatccgattggtagtgaatttgagccggataaaaaaggctattcgaccaaagctctgatcattatgaatcttccgtatctgtataatgttgcaagattcaataatcttaccatcgaaaaatactatcttcgtagatttgaagggaatgtcaagaataaaaaagaaccaaattcatcctcagaataa

SEQ ID NO: 306 - DNA, 2622 bp, synthetic construct
  source 1..2622: mol_type = other DNA
atgggtatagactattctctgactagcgattgctatcgcggtattaataaaagttgctttgcggttgccttgaacattgcatacgacaattgcgaccataaaggctgtcgtacattgctgagcgaagtcttacgttcaaaaggtggaattagtgacgaacagatcaaaagtcaagtggtagacggaatacagaagcggctgaaagatatccgaaactatttttctcactattatcatgcagaagattgcctgcgattcggcgatcaagatgcagtcaaagtatttttagaggagatctacaaaaatgctgaaagcaagactgtaggcgcgactaaagaatcagactataaaggtgtagtcccgccgctgtttgaattgcacaatggaacgtatatgattactgctgcgggagtaatttttctcgcgtcgttcttctgtcatagatctaatgtgtatcgcatgttaggtgccgtgaaaggctttaaacataccggcaaggaacagttatcagatgggcaaaaaagagattacggctttactcgtagactgctggcgtattatgcacttcgagattcatattctgttggcgcagaagataaaacgcgttgttttcgagaaattctgtcgtatcttagtcgtgtaccccaattagccgttgattggttgaacgaacagcagctgttaacccctgaagagaaggaagcgtttctgaaccagcctgcggaagatgaaggcggcgatatttccgattcgtctagttcagacaagaataaaaaatctaaagagaaaagacgtagcctgcgccgtgatgaaaaattcatcctgtttgctattcagttcatagagggctgggccgctgagcaaggattggatgttacatttgcacgctatcagaaaactgttgagaaagctgaaaataaaaatcaagatggcaaacaggcccgggctgtgcagctgaaataccggaaccaagggttaaacccagacttcaacaatgaatggatgtattacatccagaatgaacacgccatcatccagatcaagcttaataataagaaggcggtggcggcgcgtatatccgaaaacgaactgaagtatttggttcttctgatctttgaggagaaaggtaatgatgctgttcagaaactgaactgttatatctacagtatgagccagaaaattgagggagaatggaaacaccgacctgaagatgaacggtggatgccgtcctttacaaaacgcgctgatcgtacagttacccccgaagcggtgcaatcacggctgtcttatattcgcaagcagctgcaagaaaccattgagaaaattggccaggaagaaccgagaaataacaagtggttaatctacaaaggtaagaaaatatcaatgatcctgaaattcatatccgactctattcgcgacatccaacgccgtccaaatgtaaaacaatatcatattctgcgggatgcacttcagcgcttggactttgacggcttctacaaggaattgcaaaattatgtgaatgatggtcggatagcagttagcctgtacgaccaaataaaaggtgtgaatgacatttcggggctgtgcaagaaagtctgcgagctcaccctcgagcggcttgccggtcttgaggctaaaaatggttcggaacttcgtcgttatattgggttagaagcccaagaaaaacatccaaagtatggtgaatggaacacgcttcaggagaaagcaaaacgcttcctcgaatctcaattttccatcggaaagaatttcttgcgcaaaatgttctacggggattgttgtcagaaacggtgttttgatgaggaaaaaggttacaacacccaggcaaaagaacgaaaaagcctctacagtatcgtcaaagagaagttaaaagacattaagccaattcacgatgatcggtggtatctcattgaccgcaatccgaaaaactacgacaacaaacactcccgtattattcgccagatgtgtaatacctacattcaggacgttctctgcatgaaaatggcgatgtggcattatgaaaagctgattagcgccacggagtttcgtaacaaacttgagtggaattgtattgggcagggtaatatgggatacgagcgctatagtctgtggtataagaccggctgtggagtcgtcatccagttcacgcccgccgattttctgcgtttagatattatagaaaaaccggcaatgattgagaatatctgccagtgcttcgtgctggggaacaaaaaacttaacagcggtgccgagaaaaagattacatgggataagtttaataaagacgggatagcgaagtatagaaaaagacaagctgaagcagtgcgtgcaatttttgcttttgaagaagggctgaaaatacaggaagataagtggtcccatgaacgttattttccgttttgcaatatattagatgaggccgttaaacagggtaagatcaaagatacgggcaaagataaagaggcattaaaccgcggtcgtaacgatttttttcatgaagaattcaagtcaacagaggatcagcaggccatctttcagaaatatttccctatagtggaaagaaaagatgacacaaaaaaacgtcgcgataagaaacagaaataa

SEQ ID NO: 307 - DNA, 3486 bp, synthetic construct
  source 1..3486: mol_type = other DNA
atggagaaccagacacagaaaggcaaaggcatctattactattataccaaaaatgaggacaagcactattttggaagttttctcaacttggctaataacaatattgagcaaatcattgaggaatttcgtattcgtttaagtctgaaagatgagaagaacatcaaagagattatcaataactattttacagacaagaaatcgtatactgattgggaaagaggaattaatatattaaaagagtatctgccagttattgattacttggaccttgccattacagataaagaatttgaaaaaatcgatctgaagcaaaaggaaaccgccaaacggaaatactttcgtacgaattttagtctgctgattgatacgattattgatctcagaaacttttacactcactatttccacaagccgatatccatcaatccagatgttgcaaaattcctggacaaaaaccttctgaacgtgtgtctggacattaaaaaacaaaagatgaagacagataagaccaaacaggcgcttaaagacggtctggataaggaactgaaaaaattgatagaactgaagaaagcggagctgaaggaaaaaaagataaaaacctggaacataactgaaaacgtcgagggggcagtctataatgatgcctttaatcacatggtttataagaataatgcaggggtaacaattctcaaagattaccataaaagtatccttccggatgacaaaattgacagcgagttgaagctgaacttttcaatatctggtttagtgttcctgctgtctatgtttctttccaaaaaggaaattgaacaattcaaatcgaatctcgagggttttaaaggtaaagtgattggagaaaatggcgagtatgaaataagtaagttcaataactcattaaagtacatggcaactcattggatattttcatatcttacgttcaaaggcctgaaacaacgcgttaaaaacacttttgataaagaaacgctgcttatgcagatgattgatgaattaaacaaagttcctcatgaagtttatcaaaccttgagcaaagaacagcaaaatgaattcctggaagacattaacgaatatgtgcaagataatgaagaaaataagaaatccatggaaaattccattgtggtgcatccagtaatcagaaaacgctatgatgacaagtttaattattttgccattcgatttcttgacgaatttgctaacttcccgaccctgaaattttttgtaactgccggtaattttgtgcacgataaaagagaaaaacagattcagggtagcatgttaacgagcgaccggatgatcaaagaaaaaattaatgtgtttggtaagctgacagaaattgcaaagtacaagtcggactatttctccaatgaaaatactttggagacatcggaatgggaattgtttccgaatccgtcctaccttttgatacaaaataatattcctgtacacatcgatctgatccataacaccgaagaggctaaacagtgccagatagcgatagatcgcataaaatgcacaactaatccggcaaaaaaacgtaatacacggaagagcaaggaagagatcatcaaaatcatctatcagaaaaacaaaaacattaagtacggagatcccacggcactcctctcaagtaatgagctgcctgcgttgatctacgaattgttagttaataagaaatcgggtaaagaattggagaatattattgtcgagaaaattgtgaatcagtataagactatagctgggttcgagaaaggtcagaatttgtctaactctctcataacaaaaaaattaaagaaatcagagcccaacgaagacaaaatcaacgcggagaagattattctcgcgattaatcgtgagctcgaaatcacggaaaacaaattgaatattattaaaaacaatcgcgcagaattccgcaccggcgccaaacgtaaacatattttttattcaaaagaactgggtcaagaagccacgtggattgcttacgatctgaaacgctttatgcccgaagctagccgtaaagagtggaaagggtttcatcattcagaactgcaaaaatttttagccttttatgaccggaacaaaaatgatgcgaaagccttattgaacatgttttggaacttcgataatgatcaattaatcgggaatgacttgaattctgcttttcgtgaatttcattttgacaaattctatgaaaagtaccttattaagcgcgatgagatactggaaggtttcaaaagctttatcagcaactttaaagatgagcctaaactgttaaaaaaaggcattaaagacatctaccgagtctttgataaacgctattacattattaagtctaccaacgcacagaaagagcagttactgtcaaaaccaatctgtttaccgcgcgggatttttgataataaacctacttatattgagggcgtgaaagtagaaagcaattctgccttatttgcagattggtatcagtacacctattccgataaacatgaattccaatccttttatgatatgccgcgtgattataaggaacagttcgaaaaattcgaactgaataacatcaagtcaatacagaacaagaaaaatcttaacaagagtgacaagttcatctactttagatataaacaggatctgaaaattaaacagatcaaaagtcaggatctgttcataaaactgatggttgatgagcttttcaatgtcgtgtttaagaacaatatcgagctgaacttaaaaaaactttaccaaacctcagacgaacgttttaaaaatcagcttattgctgatgtccaaaagaatcgtgaaaaaggcgacacaagcgataataaaatgaacgaaaattttatctggaacatgacgataccgctgagcctctgtaatggccagattgaggaacctaaagttaaacttaaagatatcggtaagtttcggaaacttgaaacagatgataaagttatccagctgctggagtatgataaaagtaaagtttggaagaaattagaaatagaggatgagttagaaaacatgccgaattcttatgaacggattcgacgagaaaaattgctgaaaggaattcaggagttcgaacatttcctgttagagaaagagaaatttgacggaattaatcatccaaaacacttcgaacaggacctcaatccaaattttaaaacctatgttataaacggagtattacgcaagaactcaaaactgaattacacggaaatagacaagcttttagatctggaacatatcagtattaaagatatagaaaccagcgcgaaagaaatccatctggcttattttctgatccatgtccgtaataagtttggccacaaccagctgcccaaactcgaagcgttcgagctgatgaaaaaatattataagaagaacaatgaggaaacctatgcggagtacttccacaaagtatcttcgcagattgtcaatgaattcaaaaatagtttagaaaaacattcttaa

SEQ ID NO: 308 - DNA, 3447 bp, synthetic construct
  source 1..3447: mol_type = other DNA
atgaataataatattttagaacagtccactagcggttctgaaaaacgcgcatcaacacgcacattggaagctgatcctcaatattttggggtctatatcaatatggcacgtcacaatgtcttccagattattaatgcccttacgcacaagtttagtaagcaaattgagaacgcaaagccgattaacgacgatgaaaacatcgctaacgattatctgatcaatattggtaaagggaccgacaaaagtcctacaataatcgaagttctgaacccggcacatccattacatcgtctgtatggtgaacatgtatttcgggcgttaaaacggtatcttcccttggttacgattttcgaagttccatctattaacactgaagatataatcaaggacactgatgacattttgccggtgctttttcaggacctgtacgaattcattaccttgctgttttacgaactggtaaagtttcgggacgcttacacccatgctctggctctggacgaacagggaaacattgtgccccgcaaaatagatctccatcctaatcttagacattattttgaacatctgttttacaaagcgccagattatactttacggcgttttagatcgactcaagaaaaaattgcccacgggtttcatgaaaaagactttgctcttcttaaagcacataatctgtatcaggacccgcatagtaacgaattaaccactcagggcttattttttttcaccactctcttcttggaacagaaatatgcctaccagttcctcaaacggttcaatggcttcaaaaatgaaacaatccaaccgtttaaagccaccttacgtgtttttactgcgttcacagtgaaactgccgaatgataaacttgcatcagatcaccctgggcaatctttcttactggacatgctgaacgagctcaacaaaattccgcagagtttattcaaacacctgacaccgaaggatcaggagatgtttgagagaataaacgatgaggccctgaccaatattctgaaaaacacagatgaagcatccttcaaagatgttgatgaccttttaggtaaaatggccccgctgattcggcgcgaggatcgttttccatatttcgcactgtggttcctcgaacaaacaaaagccttcaatcacatcagatttcaaataagcatcggtaaaattgcatactccccgtatgacaaaaccattattggagaaacgtcacctcggataataaagtttgatatccatggatttggttctctggcagaattttcggatgaggatacgttattgaccacgttaaaacgtcagcttcccgcaggatctccacatgcgagcctgacctttagtcagtatgctccccactaccacattaaaaataacaagataggcatattggtggattatccgtccggagatagaccactctcgaatatcacccagcagcccgacggcaagatcaaagttaaccatattaaaccgaccgcctttattagcatcaacgagctgccaaaacttgtagttctggccctgttaggcacaaacaaagacaacaaaccgattggcaatgatattgaacgcctcatacgcagctttatcactaagtttaaaaatcagctttttcaccttgcgccgttaaccaagatcaaaaatggtttgacattttcaccggaaaccttcacaagacgcatggataaagacaaaatggtaaaaggtcgtattcctaaaagtgaactcgccaaacgtgaagaatacaagatctatctggaaaaacgaaaagcagttctgcagggtaccacagacttgaagttgaacgtgaatcaactgcctactaagatccagaattaccttcttaacatcgatgaagtgtccgatgaaaagtcgattcatcttcgtatcaaaacaatgattaaagaggtcgaataccgattaaagaaaattgatcgtaataagctgccaaaagtgggagatatcgcgacgtatattgcgcgagatatgctggatatggtggctgatgtccgtacaaaaagtcgcatcacttctgcatattactcgcaaatacagagagcgctggcgtattttgctctggacaagactcggctcattgatctgtgcgacgagctggggctgttcaaccatcaaactggccacgtttttcttatacgggagatttttttgaacaatcatcatatattaggggtctaccgtgaatatcttaccaagaaacagaactggatcgaccaaaatctgattgttaagatccaggagcgaggtaaacgtctgacgaagtatatcctgccgactaatcgccctttgccctataagatgaagcaatcaattaataaaggcttcgaattcaatgcatggctgcagcataaaagtacgatgccaatcgatcttcctacgacgctctttgatgagtctctcaccagcttactgaaaaagacgattgctcagaaattagggatagcgtcaaaaagtgaagataagtttgggcgcctgttagatcgcctgttgaaacaggacacccagccattttacaaatttgaacgtatctatcgcaaacctttctcacaagaggaaccggagcctttcaatatcttaaaattaacgcacaccgcactgaaacaaagatttggcaaaccggctgaagtgaatgagaaaattattcgtcaccatcagcgtaaggatcaaattgtacgcttaatgtgtgaacacttgtttaaaaataactctgagttggccttcgaaggcgagtttctgcttgagaatctccatcctgcgagccgtaataatccgttagatgcgcccatggtctttgagcagacgattccgcatacgcacaaaaaaatcgtggcccaggactccaataagtggattcaagaggtcaaaaaaactaataaccgtaacaaggcttggtatcgatggacattaaaagactttggcacgtttcggaaaattatacatgatcgtcgcttacccgccttggtcaatagcataaccggtgatgaaatagattttgatctggtgcagttcgagctggccgcctatgatcgggcacgtgagaccatatttgatcagctgtttctgttggaacagttcattgcggataaggacatgtcgtatatcaagcagcataaagcgatagagcgcatgcaagacggaaaaggctttgatgaagttcaattcaacacctatgcagactggttaagcgataaaggattattgacaccagatgagattaatggtctgaaagaaattcgaaatcgcttctctcacaaccaatggcctggtatctccaaacttggtattcagccaataagccaggaacagcagtcagcttttgtaacccatctgaatattaaaggttgggttaatgaacatcatacgcccctcgccatgtttatggaaaaactggtaattaactgggtgtcaaaagcgatcacataa

SEQ ID NO: 309 - DNA, 2415 bp, synthetic construct
  source 1..2415: mol_type = other DNA
atgaaaatcaaaaacgaaaataccgacaagaaaaccgagttatactctatagataagtataagggacgggataagtggtgttttgcaattgtgctgaacaaagctcaaacaaatcttacggaaaaccctgatctgtttgaacaaacaattacgaagtatgaccgcattcgtaaagaaggttggtttgatgaagagacgaagaaattaatctacattcaggaaaatgagcataaaatcaaaggcgaaatcaagacattagcgcgcgaagtgctcaaaaaccttcggaattatttcagccaccatttttacaaacaggattgcttaatttttcctaaagataatatagtgcgaattatcatgggtcgtgcgtatgagcgctctgaatacgaaattaagaaaaaccttaaagaagacatcagtattgagctgccggctctgttcgagccggaaggtaaaattaccaccgctggaattgttttctttacctcttttttcgtggagcgccggtttctgcatcgcttaatgggctcagttcaggggtttacaaaaacagaaggcgaatataagataacacgtgatgtctttgcgaaatattgtctgcgtgattcttattctgttaaagcgcaggataatgatgcggttatgtttagagatattataggttatcttagtagagttccaacagaatcctttcaacatattaaaaatccaaaaaaacagaatgagagccagctgtccgaacgaaagacggataagttcattagttttgccttgaaatatttgaaagactatggttttgaggatcttaagggccattataccgcattctttgctcgctctgaaatcaaaaaagaaaaagaggatattgagatcaaagatgacaaaaaacacaaaccccaccggatgaaatcgaaaatagaaattcacttcgataaaaccaaagaggatcgtttctacatagaacgaaacaatgtcattttaaagattcaacgtaaaggtggacgtgcaaatattctgcgtatgggaatctatgaacttaagtacttggtgttgttatgcctgagtggtaaagccagagaagccattaatcgcatcgatgattacctgaatgatcttcggaataaaatcccgcatattgagaacatgaataaagaggggatcggtgaacagattcgttcgctgccgggttttgttagatcccaattaggtttcgttcaaatagacgatgaaaaaaagaaagaaaaccgtttggactatgtagagaaaaagtgggaaaaaaaacgtgccgaaagtaaagaactgaaactgaaccgcaaaggccgggatattctgcgctatattaacgagcgttgtaaaaaacctcttactatcgatagatataatcgcatcctggagttgctggtcgaaaaaaacattgaagggttttatcatgagttagaagagctccggaaaactggcagaatcgaaaagaatataactcaggcactggtaggtgaaaagaatatcaatgcgctgcatattaagatatgcaaactggtgcaggatgagttaaaatcattagaaaaagaagatctgaaaaagtacattgggttaacgccaaaagaggagaaagtagttagctttgaagagaaattaggtcgcattcttgacaagcccgtaatctacaagggctttttacgttatcagttttttaaaaacgacaaaaagtcattcgcacgactcgtagaagaaatcattaaagaaaaaacgggcggattagacgttccaattgaaactgagtattattccatatcaacactggggcgctttgataaagcaaacaaaactctctatgaaactctggctatggaccgtctgtgcatgatgatggccagacgctattttctgtcgctgaacaaaatcctggcgaaacgtgcacaaaatattgaatggaagaaagaatcaggcaaagaattcatagtcttcaagtttaatatgcctcaggatactggaaaaagtataagtattcgattttcaccgaaagattataccaaactctacgtgaaaaatgactcagaatttcttgctcgcctttgtcaatacttttttcccaatgagaaagccattgactaccataagctctatagccatgggatcaataagtataccaatttccagaaggaaggcattgaggccattttggaattggaagaaaaaataattaagaaacggaagatcaattcgccggagaattatttgagcttcgaagagattttgaaccagtctatctacaacgacgaggaaaaaaacaccctgatccagatacgtcactcccttctccactatcagatcctcttcagcaaaaacgacctgacgaagttctacaatgtcatgaaacgcgaggggattgaaaaaatatggagcctggtgatataa

SEQ ID NO: 310 - DNA, 3384 bp, synthetic construct
  source 1..3384: mol_type = other DNA
atggaaaatctctcaaaagagcaaattgttgaaactcaggagcagaataagcgcacctggggtaatgatcctcagtattttggagcatatcttaatatggctcgtctgaacatctacaatgtttctaatcatctggccgaaaaatttggtatcacagcaattgagaatgaagagcaaatcagcaactcatttcttggggacaaagagaacaaagtgttcaaaaacaagcagaatcatattttttccaatctgatacgctatcttccaatcgttaaggtatttgatttcgaaaaactgccggaagaggagaagattagcttgaaagataacttcggaaaagacttcaaagagctttcggatacattaaaaataatttttagcgagatcaatgagttcagaaacgactacagccattatttttctaccgaaaaaaagaataaacgcaaaaccaaggtctctgataaactcaaagattttctcaacattaattatacgagagcaattcagtatacgaagaaccgtttcattaatgtgttctcagataatgatttttgtttagccgaagaagcaaaactggtcgaaaatgataacaccattactcaagatggtatcgtattctttacgagtatgtttttagaccgtgaaaatgcattccagttcatttctaaaattaaaggtttaaagggaactcagaccaaagcgtttaaagctaaacgtgaagttctgatggccttttgcattaatcttccacatgacaagtttgttagcgaaaatacagaacaagcctttagcctggagttaataaacgaattaaacaaatgcccgaaaacgttatacaatgtgatttctgaaaatgaaaaacaacactttttaccgaaactcgaggatgaacagatcgataatgtgctggaaaacagtgttccctacacgattgacgactatgagaactatatcgaaaatatcacaaaaaaagtgcgaaataagaatcgcttttcgtattttgcactgaaattcatagatcagaaagagcttttcaaaaattggaagtttcagattgatctgggtaaagtggtcttagatgagtatacgaaaactctgcaaggcaaagacgaaacaagaactgtagttgaaaatgccaaagcgtttgggaaacttcagcaccttaatgacgaagagaatgtcttaaacaaaattaataaaagcgagtcgaagactcattttgagcaatttgcgcctcactacaattttgataataataaaataggtatttcccggaaagaggattcagcgatttttatcagtcggaataccgacaaaaaagttaagtttaatctgaaacaacctcttccagaagcttttctgtcaatccacgaattacccaaaattattctcctcgagtatctggaaaatggtaaaaccgaacaactgattaatgattttatcgagatcaacaattccaaaatcctgaacaagaagttcatcgagagcattaagagtaagctgacagattttaatacattcaataagcgctcacagggcagaaaagagaaatcagcctataagaaggaagctctcaaatatttgctggatcgtaaagaaaagctgaaccagattttagctgagtacaatcttaatgtaaaacaaataccgacgcggattctggattattggttaaacgtggctgatgtccaggaaaaaaccgcgatatctgaccgcattaaactgatgaaacgggattgtatggatcgtatcaaagctatgaaaaaaggaaaagcacctaaaataggtgaaatggcaacctttattgcaaaagatatcgtggacatgattattggcgaagaaaagaagaaaaagattacctctttttactatgacaaaatgcaggaatgtcttgcgcttttcgcggacaaagaaaaaaaggaattgttcattcatatatgcaacaatgagttgaaactgaatgagtcagatggccacccgtttttgaaaaacatcattctgtatgattaccgttatacctcggatctttatcgtcgatatctggaagaaaaagccgataaccggaataatctcaataaaaacgatacatcgtggctggccaaaaatttctattttatcgaaaaagtggaagtattcgataaacgactgaaccgcatggaattcaagccgcagacagtagtcaaaatcaaagacaaaagtaagataccgtttaccctgcgtcagttggaaaaagaaaaaagtagtttcgatacgtggttcgaaaatataacgaaaggcaaagaaacaactgacaaaaaaaagcctgtcgatcttccaaccaacctgtttgataactatctgaaggaattattgattaaggatctgtccaagaacaatattaagtttaacccaaagactaattacaacgagttattcaagttgtggtggaaagaatgcagaaaagataaaactcagtccttttacaatgcggagcgtgaatactcctttgaggacaaaaaactgaactttaagataaacacgaagtccaagtttgaagattatatcaaccccgaatttgctgaaaaagtttttaaactgaaatcttctcgccgtgaaaaagaaaattctaccgggcgcaaacttccgcctctgatgattaaggatttggaaaaatcaatggcgaacaaaattgggagtatagaaaaagacattcgaattttacaggaagatgattgtatgatgttgctgatgttcgagaaactcgttgataataatctggaactgaaactggagaacgtggacacattgatgaatgagagcattgaaatcaaacaaagcatattgggaaaactgagttttgacgactttggggacaacgtaaacaaaaatgatcgtattatcatcagcaaaaatattactgagacccggaaacgtaaagagtattcagttttaaaaaaatatattttcgatcgccgcttacccgagttatttgaatatttcgaaacggaagacattaccatggagaagataaagttagaactgggtacttataacaaagcaaaggatatcgtgtttgacttgatattcgacttggaaagtgccatcatcaaaaaaaacgaaaaccggataaaagagctcaacaaagataaaaacggcaacatccagacgggcaacattcaacataaaccgtacctgttctggctgctcgaaaaaaatcttataactgaacaggagttcacctttcttaatatggttagaaatacattttcgcataatcagtttccacaaaaaaagacaatggaactttttatcaagaattggaataagaacgaatacgccaagcagatactgacagtctacaccgaaaagattaacaatcttatcgagaaagttattgatatatga

SEQ ID NO: 311 - DNA, 2637 bp, synthetic construct
  source 1..2637: mol_type = other DNA
atggctgtgaattacagcctcagagaaaaatggtatcgtggagttaataagtgttgtttcacagtagcactcaacattgcagtagataactgcaaaagtaaggggtgcgaaaccttactgaaagaggcggaacattctaaaggtggcataaccgatgaacagattcagcagagttatacggaagttgagaaacgccttaacgatataagaaactattttagccacttctatcacggggatgaatgcttaatattcaaaaaagacgacatcgtcaagcgcttcatggaatctgtctttgctactgcggtgagtaatgtagtgggcggtactaaagaatcagattataaaggtgttgtcccgcccctgtttgaacaatccaatgaagattatatgatcactgcggccggcgtgatctttttagcctcgttcttttgtcatcgctcaaacgtttatcgtatgcttggcgctgttaaaggttttaaacataccgggaaagaagaactgtctgatggtcagaaaagagatcatggttttactcatcgtctgttggcccactatagcctgcgtgactcttattcagttaaaatagaagagaccaaaagttttcgcgaccttctgggttatcttagtcgagtgcctcaacaagctgtggattggttaaacgagcgtaacgagctgtcggaagatgagaagaaagagttcctgaaccaaaaaagcagcgaagaggagtcgccggaacagcctgaaccggaaaatgccgaatggcgtactgaaaagacaagtcgccgctcattacgtaaaacggaaaagttcattttattcgccgctaagttcattgaagatagagctgaaaaagaaaaacaagatgttacctttgcgcgttaccagaaaacggtaacaaaagaagagaataaaaatcaagacggaaaacaagcccgcgtcgtgcgattgaaatatgaggaagataaaaaagatgatgaaaaaccgcgcgaacatttcaaccttgagtggatgtattatattcgcaatgaacacgcaatcatccagatcaaaccaaaagataaagaggccgtcgcagcacgtatatctgaaaatgaattaaagtacttggtgctgcttatcttcgagggaaaagggggagatgcttttaacaagcttagcgactatatttttcggatgacacagaaaatcaagagtggccaaatcaatcccaatgaagcgcggctccctagctttctgaaaaacccagtcaaaaatattacggacaaaatggtgcgaaatcgtctcgactatattcgagggcagatcaaagatgtgttggaaaagattaatatggaagagccgcagaacaacaagtggctgatatacaaaggcaagaaaatcagcctcgtgttgaagttcatctcggatgggatttcagatattaaaaagcgtccaaacgtgaaagagtatgataccctgcgggacacattacagaaactggactttaatcgtttctacgagcggctgaagtcctacgtttccgacggtcgtctggctgcggcgctgtacgataaaatcaaagggattgatgatatttctgagctgtgcaagaaagtctgtgaactcatgtttgcacgcctggccgagttagaaaaaaaaggtggatttgaattgtatcgctacatcggaatggaagttcaggaaaaggatgagaaatacgatgaatggaattccccacagaagaaagccgaaagatttctggagagtcagttttcaataggcgagaattttcttcgtgagtccttttattcggagtactgccagaaacaagagtgcatagataaagagatttccctcaatacaagcgtaaagaatcggaagagtttggtatacattgtgaaggaaaagttgaaagacattatgcctctgcataatgaccgttggtatcttatcgatcgaaatccgaaagattttgaacgaaaggactcaaaagttatcaaaggcctgtgtaatacgtatgtacaggatgttctttgtatgaaaatggcgagatggtattatggtcaattaaacccagcgctgaaaaataacattaagtgggatgaaaccggtcaaggacatggttatgaccgttacaaactttcctatcgtaccaacttcggaattactatagagttcaaactggcagacttcacacggttagacattatagagaagtcagatatgatagagaacatctgccgcagctttattaagccgaatcgcacgatttcttggtacgattttaaacaggatggtgttgaagaatatagaaaacgtcaatataaagcagtacgtgcagtttttgcatttgaagagtcgctgattattccgggccgggactggctgtctcagggctttgttccctttattaagaatgaagaatacgtcaaaaaaggcttcagcctgttcgtattagatgaagctgttcggcagttaaaaattaaaggttctgacaaagacgccatgcgccaggtgcggaatgatttttttcacgaacagtttcaggcgaaagatgaacagtggaaagtctttgaaggctacttgtcatgttttatgattgatcgccctaaaggtgaaaaaaacaagaagagatataatgggaataaaaaataa

SEQ ID NO: 312 - DNA, 3084 bp, synthetic construct
  source 1..3084: mol_type = other DNA
atggaagaaaaagagaaaatttctatccagactattcaggatgctccgtattatttttctcattatgctaatatggcgcgacacaatgctttcctgattgtgaatgaaattaatgaaaaggtcttccaacgttcagcaacaaaagaggatgaactgctgcgtgaaagctttctggttaaaccgcctagacagcaggctgatattattggaaaaatagactcattattacttcaccattttccatttctcgcctattatgagaataaaagtgccgggtcggcccgtgtcgagttaaaaaaatacatggacatcttaaaccaatttcgcaatgaggtgacacactacaagcatccagttgaaccaaagtgtatcgtcaatcttcaggaagtgttttcttcagccgtggaaaaagtccaggaacgcatgattgccttttctgaaaaagattttgagcatcttaaaccgagctcaagtgactatcgtcattatatcttaacggaagccggtatcaataccttgactgacacgggtctgtatttttttctgtgcttattcctggagaagaagtacgcgtataagttcttggccggaattaagggttttaaaaataacacagaccatacacacaaagtcgcattggaagtttttacgcaattttgttgtcgtctgccatattctaaaagtgcatcctctgatattgcactggatatgctgaacgaactgaaccgatgccctaaagcgctgtatcaggtaatagataatgagcagaaagagctcttcaccgtcaaaaaagaggatattgtggaaaccgaacagggtaccgaggatgtgccggaacccgttatgattcgttatgatgatcgctttccgtattttgctttacgttattttgacgaatcagaagctttaactgatatcagctttcagctgtatctggggagaaagcataaaaaagaactgcaccgcaaaaaattaaacggcgaaatgcgaacccataatcttttgaaagaaatgcatgtgtttggcaaactggcggattatcaaacagaagagatgaccaaaagttttattgaatcaaaagcagttgagcactatgcaccgggttatagaattgtaaacaatcgcattggggttttactgaaagcacccgaaaagtgttccctgacgagtagtattccgcaaaaaacaaatactgcgccgtctgcaatactgtcaacccatgagttagcagccttgtatctttataatagactgtacaaacaagggtccgctgacaattccccagcgtctatcattaagaagtatatcgaaaacttcaaccgctttatcaaagaccttcagtcgggaaaaagtcaacctgtagagagcgggggatttcgtcgcatgcggaatagtaatagagatgaagaagagcgtctgaaattacagaaagctaaacaggagctgcagaaacagttggatgtttacgaactgaaagtgtcttaccttccggatgcatgcttagaatatctgctctcctataagaaagataacaaggaattcatgttaaaagatacgttccggaaaatgtggaagaatgcagatgaaggtttggagaaaattcgtaaaaaagaggagcaaaagaaagaagtgaaacaagaaaaactcgcgcaggaactggcgcaagattttgtgtatctgacaccgccacataaagaattgtcagaaaatggcacggaaaaatccgtagacaaaaaaattaacaacatggaatttgacgtgctcaaaaacatgctgacctatttcccgctgtacaagaatcgtttaaaaccatatctgaacatactgaaagatactgagaacaagtggcaacaccccttcctgcatcttgtcctgatctacgatttcgattcctgcaattcattgaaggatttctatgtgcgttactacgaatacaagaaaatatggattaacaagttcatccaacaagataaacggaagcggtggaatcttgttccaaaacagaatgtcaatgatctcattaagaaatatgactactttcttaagaccacggtgaagtttaagagtgcgaaggagaaagagtattctaaagatgcgatatttctgcctaagggcttatttgatgcccatatcgctgaggctatgaaaaaacagaactatgaagttaaagaaaccgacaacgctgcctattttttgaaagtttacttcgacggtaaaagccagaattactatagtctcccccgctactatgacgcgtcagcagttggctggctgacccatgaagcgcgggatattctcaaacgaaagatagaagagacttgggaaaccaaaaatgacgaggagttccgcaataaactcaaaaagttaagcaaagatattcgggagtcggaaacagaactgttgcatcagcagacgaatgatcgcactttatttcttatggttaatgatttgctcagcggcaacactaacaactacaaagacattgtagatcttggctacaataacaagagtgaaaactcgattttgaacaagctgtatcctatcaaagagaccatacacgacaagattgtcactgcagaacttcctattaaacgctatggtgaattcaaacgctttatgaaagatagacgattacccgatctgcttggttattatggagaaaaagaaatacctctgaaagtactggagacggaaatggaaacctatgaccgtatgcggaaagatgccatagagcagatctacaatttcgagaaattgatctatgataacttcgagtcggaactcaaaaaaagcgtagacccgtcggccttatacattgatcataatcactaccttaactttgtaaagcaaaagttcaaattggaaactgttatcactgagatgcagagcgaatcttttagagaattacgcaataaaatagaacacaatcagtttccgcctcgtgaagactggataatcgacaaaattagccaggatacgacaacgacaataatcacagagaaaatcatgaatcttatctccaccgagtacaaaaagatttggcgtgaagttgaatcaacaaccagcattagcgatatggaataa

SEQ ID NO: 313 - DNA, 3630 bp, synthetic construct
  source 1..3630: mol_type = other DNA
atgaaatctccatcgaaaaatccgcggtccgaacaggcggtggattatgacttctttgtcggtggtcgttccaaaagtgcagatcttaccatctactacaatgtcgcctttgattctgttgttaagatcaaaaagcagatatcaaactggcctgacagccggcaatatgcgtttttagctgagtatctgtggaaagcgcattaccttcaaaaaaatagtaatggctatgaggtgcagccaatcgatgaatggattatacaagccctgattgctaaagttgaggcgatccgtaacttccattctcacatttggcacgatcatgaagtgctcatcttcgaaaaagaactgaaagactttgtggagcagaaatacgatgaagcgaaagccgcactcagtgccgaatttccgggagcaatgctcgagtacgaggatcttgcgcgcaccggtcgcatgaagaaattttcacttttcaaacgtgttcctgaacggaaaaaagactttattacagttgagggccgcatctttttcctgtccttctttctgtctaccggggaaatgaaccagttactgcaacagcgacgcggctttaaacgtagcgatatgccacttttcaaaatgaaacgcctgttgtacaccttttactgtcaccgagatggcgcctcgatgttggatttcaatcataaagaacaattcatagattctatggatgagcagcagaaacgtgacatctttaaggcccggacagcgtataaactgattagttatctgattgattatccctggtactggggttccagagactcaatgccactgtttgatgaaaaaggagagattattcggaatgttggccaactgaaagattatcttgagaaaaatccgcacctgctcccggagcttaactttcatcttttagatcgaaagatccctgcaactggcaagtttaatactcgcaaggaaaaagagaattttgcaaaactgcaggatgatagatatagattaggaacaatagcttttaactatcttcctatacccaattatacctttcacatcgactttgaaacgttacatcgattggtattgctgcagattctgcatcacggttctaaaaaagaggtttcaccgtatcaggtgttagaattgaacttacggagcatagtggagaaccgtgtaagtctgtacaacattctgtgtaaacaggataatgagagaacgggggaagatcttgactttctgttagaccgcaaaaatcagagactgagaggtggccgcaagctgaccgaatttggcatcagctattttgaaagtattgaaaaaggaagcggtgctaaaattcgtgatagtatccagctggctaactatatgcgttcgatggatacagcatggttagaattaccttatgaaggagcccataaagttgaaattcaacccctggatccggaaccgattatggtataccaacaggattttttagaaggcaccacgcagaaatttcgcgccggaaatcgttttatgttttacgtatctcggtatcttatggatttcgcaggagacaattggtattggggaatggaacgttttgaaatgcgtaaaaaagatcagaacgcccgaagcgaaagcttgattcgcactaaagagtaccttagagcatccgatatacctctgaacggcgattaccgcttaactctggataacgatcatattttcttagcgatgccgaagaatggtccgggcaaaaagaatcatgaaaaattttaccaatttgcattaggtccgcgtgccatgcgttatcttggtgcctatatcattaacaatcgtgctgactttgttagcaaggcgaaaggatttttggatacattagttcgcgatcttgaccgtctgcacaaaaatgaatactggaatatggaacatgggtacgaattattggaatcccccttcgtttcagggtttctgaagaacgttcccacgaatatcgagaaactgttaacgctcgttaagacgcgtatcgagtatatcaagcaggagtggcagcaagctctggaaaataagccgtatctgagtcgcgcgcaaaaaaacaaactgataatggatgcatatcgtctgttacagtggccgaaaggcaacgatggcaatccacgtttttttcgcgcccatgaatacaatcagatgtcggtatgccattattctctccatttgaaggacaacgagcaggataaagagtcgcggaaacaaattaaaaaacgcttcaaaagtaagtatgaccacctgttcgaggacgtcttcaaactgaatactcgtaaaccgcctattcctcgctctattctgtcactgctggacgaggcagattcacttgacgaactcatgaagaaaacctttgaggagtgtcaccagctcctggataatcgttattcacaactcaaatcgttaccaaatcaacagctgaaacgagaattacctgagctgtgccgcctgttaggaatctcagtgccgttaaacatcctgcgagaacaggaaaaaaaggccctgaaagagaagcataatacgactctttgcgtaaagccgttcgatatccatcccatgttagttgtgaagtactttttcccagaacagtataaagcaagtaaaagtgtagaatttgtcaacaagaatggtgaaaaagtaaagaagcaaccaaccttgacgattttttcagcgctgcgtaaaaatagagcactgagagaaaaactcgtggaagacttctacgacgaacagaatagcgctgtgctctatcccgacgatgacacaaaaaaacagaaagaggtgctgacaggtttgatgaacacaacttgtactgaagacatactgttgtggtggatggctaatgaatatcttgtcaataatccctatacacaggctatgggtgagcttttaatgaaaaaaccacgttccggtcggcagtatattggggatcttcataaacttaccattttacaaccgctgccaaaggaaagcgggaaacggcaaatctacatgagtattttgatgcaccagttggacgaccttatgttcattgtccagaaatcccggttaggcaaagcggcggaacattttgtccagcgttgctccaccgaaaatgggatttgggctccggaaattgaaaaattatcaaccaatcaattggcaggggctccttttccggatggtaccattaacaaccctattccttttcagctgctgctcgatgagattgaactggtccgccgtactggcctggaattgggtagatatcttttggaattcgaaaagaagatactgcaacaggcattgaacggctatgagagcaaagaagcgttccataagtggctgaagaatgagtatgagaaaacagagtattatgggaagtacccagcctatttcttcaattttgatagcatactgaagctgtctgggacagtggacaacaacatagacaaagatctcaacataacgttatctgattatcgcaacatcacgttccacaacgatatcccgtcgaatggtagctttagctggttaactcgggaaggttcttccgtgcgtcagttactcggtatagaaaaaaatttgcatgaaaaacgtgatcgctcagagtatgaaaataatcgtgaagaataa

SEQ ID NO: 314 - DNA, 2397 bp, synthetic construct
  source 1..2397: mol_type = other DNA
atggaaaaagaacaggggttatacagtattgatcgctatcagggggctgggaagtggtgctttgcgattggtgcaaatcgagcttgggataactataacgaacgaccaaaacttttctccgaaagcttattacgctatgaaaaagccactcgtcgtgactggtttgacgaagagacaagaggacttatcaaaaaatctgacgttcgtcagcggctgcgtaaaatccggtgctatttttcccattattgccacgacaatacctgcttaggcttcgatccggatgacgatctgcggaaaattatggagaaagcgtatgagcgtgccatatttgaacaacgtaaacatcttagtaccgagaccgacattgaaacgccagcattattcgagcctcatggtagaataactgccgcaggggttgtatttttctgtagcttttttgtggagcgtagaatcttgaaccgtctgatgggtcgtattccgggcttcaaaaaaacggaaggtgagtatggggcaactcggcagatgttttctaagtattgccttagagactcatatagtattcgcgcatcggactcaaatgcggtcctgtttagagatatcctgggttacctgtcacgggcaccgagccaatactatcgccacaataaagatcagtgcgacaaagatggccatcctgagagaaagaaagataagttcatcaatcttgcattgagatatcttgaaagcttcgtacctgcccgtttacgcaatcatacgctctctgtcggtcgtaaagaagtcgttcgtatggagacaaatgccgtcgctgaaggcgaaggcgaataccgcccgtatccgcccaaagcaaaggtgaaagttgtattcactgaagatgatccggagcgaccatactatattactcataatacagttattctgcagaccgcaaagaaggaagaggacattcaccattgtaaagttggcgtgaacgagctgaagtaccttgtgttactctgtttgcaaggaaaagccgaaaaggctgtcgcaggcattgaaggttatgtgcgcagaatccaggggcgctttgccgatcacaccaataaagtagcgcgcgatgatgatgaacggctggtacgcggcttgccagaatttgtccgcgtggcctcaggaattgaaacacccgacgaagtccgggagctgaaaagccgtctcgatcacatacggaaaaaatggcagaccaagaaagctgaatcggctgaagcgcaattacatcggaaggctcgggatgttttacggcacatcaattgggagtcacagcgaccactcggaatcgagcaatataaccggttactcgagctgttagttaaccgtgaccttgaatccttcgcagccgagatgaaggaactgaaaagacgcggattgatatccgaggagctcttaaaaagtgttgagggaattcgtaacctgaatacactgcatgtgaaggtttgtaatctggtcctgacgcgcttggaacatctggttgaaaacgatccagaggagttaaaacgacacattggtattgtaccgcgtgaagaaaaagaaggtccctcatacgaagaaaaagttcgtgcctttgtacagcaacctatgatgtatcgtggtttcctgcgaaattccttttttaaagggtctggcaagagttttgccaaacttgtggaagaagaattgcacaaaaaaggttgtccggatgtgcctctgggcaccgactactaccttgtgcgcgatttggaacgagatgaacgtaaaaaccgctttcataatgataatgcggcgctctatgaaacactcgcgttggatcgtctgtgtgtgctgatggcgcgcgactgtttggttcgtctgaaccggaaccttgaaaaacatgctacgcgcatatcttgggaagctaccgatgcgggtgatacaatctgcctcgaattgccgcgccgtgatcgtgatcatgaaagctttagactgtcttttggggtccgtgattatcctaaactgtatgtaatggatgatcccgtatttctgtgtggtttaatgaagcactttttcccggacaaccaagcaattcagtaccatgagctgtactcggaaggaatcaataagtatacggctatgcaggccgaaggtatcgcggctactctgaagctggaagagaaaacgataaaagaaaaaaatatgcagataccagccaccggttacattcgcttttgcgaaattgttagccagtcggacttcgcacctggcgaaaaaagagtgctgaaaaacgtgcgtaatggcttactgcattatcatcttgagtttgaaccgacagaatgggcggagttccgagagataatgaaacgcgagggatttgatactgcgaagaaacgtaaaagtacccgcaaaaagtaa

SEQ ID NO: 315 - DNA, 3417 bp, synthetic construct
  source 1..3417: mol_type = other DNA
atggaaactcaggaaaatgaattgtttgagaatcgtagacggacactcgcagatgatcctcagtactttggcgcgtaccttaatctcgctcgtctgaacatcttcagcattaacaattatctggcgaaggaattccaacaaacagaattgcgtgatgacgaattaatccagaacggtttcatctgcattcccagccagaaaaatcgtaacgacaacaaactgttcgaacgcttaatccgtctgatgccagtaattaaacaatttgatgcggccagactgccgaatgaagaacaaaaaagtggtcaagccgaaggtaaagatataaagactatggccaaaacgctgaaagctctgttcaaggatatgcaggaatttcggaatgactacacccatttttatgcaacagataaacaggaatgtcgtaaacttacggtcagtagcgaaaccgctacttttcttaaagccagctttgcccgtgccatagaatattcgaaagtacgttttaaagatgtgttagcagaagatgactattcccttgtggctggtaaagaactggtcgaggatgagaacaccataaccaccgaaggcctggtgttttttaccgcgttgttccttgaccgtgagaatgcgtttcaattcattggaaaagtgcaggggctgaaaggcacacagttcaaaagctttattgcaactcgcgaggtgctgatggcttattgtgtccgtttaccgcacgacaaacttatctctgataatcctatccaggcattactgttcgacattttgaatgaactgaacaagtgccccaagaagctgtacaatgttctcagcgaagaagtgaaaaaagagtttcgtccagagctttccgagtcaggaattgagaatatgcttgccaatagctttaatgatgaggaacgagagaagttgttggacgagattgaatataaagagtatatcgagcagcttacgatacgtgtgcggcatagtaatcgttttcactactttgcgatgcgctttatagacgagcaagaattatggccaggaattcgctttcaaatcgatcttggcaagtatacgctgacacagtatgataaacaggttttaggggaaagcataccacgctcggtggtagaaaatactcgggcatttggtcgtctgtctaactttctgacagccgatcctgactctctggagcagcgtattgatgttgatcatcgggccaatggctttgaacaatttgcgccccattataatgcagatattaataagatcggtattgcattcacagagaaggaacagttgccgtacgtcgtaccgacaaaaaatgcggagaccaatcgagtcaagtattcctttaaacagccacagccggacgcctttatttcgttgcatgagttggcgaaagccattttactggaacagttgcagcctggcgaaagtgaaaaactcatccgcgcattctgctctacagcagagaataagctgtttaatctcgaattcatcgaaagtatcaagtggaaactgccggattggaaaccattccagaagcagtgtgataccaaaaaatcgcgtgcctacattaccaaaaaaaagatgttcgcttatgccccacgcgatcggaaaaaattgctggatgaactgctggccccgtatggcctgaactggaaacaggtacctgaacgtatactgaactattggttaaacattgaggaagtccatgatgcgcgatcaatcaaagaaagaattttactcatgaaacgtgatgggctgaaacgacttaaacaactggaaaaacatcgcaaagatccttctattagaatcccgaaagttggtgaaatggcgacgtttttagcaagagacattgtggacatgatgattgataaaacaaagaaacagaagatcacatctatctactacgacaaaatgcaagaatgtctggcgttttatgctgacgcagagaagaaacgccagtttataggtctggtgcgcgaactgaacctgaacgcaccggacggacaccccttccttaaaaacctcaacttggaaagtattcgcaagacgtcagagttttacaagttgtacctgatggagaaagttgagaaaatgatagaaaacggctataagtccaacggtgacaaacgttttaagaacatcgcttggatcatacgagttttcgaggaaaagcagaaaaacgaaaaaaatgggaaagatgacaccatctatcgcatcccaaataatcggaatgatattccgtacaccatccgtcagtgggagaaagagacttctactctcgaggaatggctgcatacgatcaatcatggaaaacaagagggtgaccggaaaagacctatagatcttccgaccgatctttttgatgcccgtttatgcgaattaatgaaaggacagatgcaggagaatggccaaacgttcgccgatacagctaagtataacgaactgttaaaacagtggtggtccttgcgggaagatgaaactcagcctttttacaatggagcccgccactacgttattaaagaagaagctgtgtgttttatgcctggtgcccagccgcgactcaccagttgctatgcggatgcagtagaggaagcttataatagactgagtgcagaacggaatatagcgcgccgccataacaaacaattacctttaatccaaaagcagaaagtggaaaaagtattcaagcacactttatatgacacggagcgtgaaatacgactgctgggcgaacaggacagaattctcttattaatggcagagcagttaacaccgggccgtgaaaccctgaagctgaaaaccgtgtcagaagaactgacacgcccccgcgagattaaaaaagaattcccgtatatttctaattacaacgcgcaaggggagaagctgccaaaagatgaaccgaagccgaaaataaaagtcacggttacgggaattatgcaactcaaaaattccaatgatcttaatagattcgcgcacgaccggcgcatgccagagttagttgcatatcttccgaatgcaaccattgatgctgataccctgagatatgagttaatggattataataaagctcggttgaccgtttttgacgctgtatttcgtttagaaaaagctattattgatcaggatcgtgaaggtgttattactttattcactgatgaacaaggcgaagccaaacaagggcgcatgcagcataaaccttatcttcagtggttacttaacaaggggatcattactcagccagaatcatcgtatcttaacatgctgcgcaactcattttcacacaaccaggtcccccatatagcagttgctctcaacggtacggaagttgtccccgttaaaaatattgcatcaacgattgcgggtgcgtataaacaaaagattgaaactattattggtaaaatagggtaa

SEQ ID NO: 316 - DNA, 3258 bp, synthetic construct
  source 1..3258: mol_type = other DNA
atgaaaaaagagttgaacagagaggatgtttttactgggggcaaaacccctgaactgacgatctattataatatagcttatttccgtatggccggtctgattaatgcgctgtgcggcaataaacttgagcgagataaggatgcgctggagcagttcatgaaagcctttataaacgggaaacagaaattaacggacatgcagtttgtgaaactttgcgactatctttggaaaggctacaagtatgataaaaaccgtagcgagtattcgctgactgaaaacgataaaacgatggtcctgaagatggtagccaaacttcaggatattcgtaactttcaatcacatatctggcatgataataaggtcctcgtgtttgatgcggatctggtccaattcattaaaaataagcatctggaagcgattgatgcacagcgccagcgcttttctaaagagacagaagtgtatgagaaagaaaatcgggagcttaaaaagaaaaagaacaaggagttactgtttgacatccatgatggattgggttatatcacaggtgaaggtcgcaactttttcctttcattttttcttacacgcggggaaatgacgagatttttaaaacagcgaaaaggatgcaaacgtgatgatacaccggaatataagattaaacatcttgtttatcgtcattttactcatcgcgatggagcgacaagaactcactatggttatgaggataatatgttagatcagttgccggataaacaggagtttcttaccacgcgccatacttatcgtctgatcaattatcttaatgacatcccggaagaggttacgaatccagagttgtttccgctgttcaataccattagtaacgggattctcataaaggaaagcgtcggcacttatatcgcctttatcaataaaatgcctttgttatcggactttgagtttagtgaagtctggggcaaagatggtaagccgtatactaacctggtagaattttaccataaaacacaacctgggtttaagtttcgcacagatcttaacagtttccacaaaatcattttaaacttaattcgggacgagaactacacgggattctttacgacccagcttaacctgttcatggcacatcgcgaggagctgattttagttatttcgaaaccactgatcacacctaatgatctgttgctgattgaagaacactatcggtataaactcaaagccaacgatttcgtccgggaaaaactcggtgaatggaaagaaaagattgaaaaaggtaagtgggaaaaagctaatgaacaaaaagacaaactgatcaatcttttgggtggcgtaatcgagataaccttttacgatttttattggcaaaaggacgaaaaaccccgcaacgaaaatcgctttatggaatttgctattcggtttatggctgactttaatctgttaccggactgtgaatgggaagttgaaccattacagatagaaaatgatctgattgcaaatcggaccgcaaccccggatttgaaaaaatcgggttctcaattcatgaatcaactgactgataactatcgtttgaaattcaatgatggtcaaatagcttttcgttaccagaatcaagtgttcataatggggcacaaagcggttaaaaacttgctgatagcctgttttgacgggaaagaaaaaatgttaaacggctttatgccagcgctgctcgcagacctcaagaaaattaccaatgaacatattctgaaaaaccatcaggcgctgaacacgctctcactgctgaacaatgatagtatacccagctatatttctcgccagtggggtgaggcagagcccatcacggatatgaaaaaaaaggccatcgcgcgaatggactatattacacagcagtttgaagcattgatcgagaatcaccattacctgaatcgagcggataagaaccgacagatcatgcgttgttacaagtttttcgaatggcagtatccccagaattcccaattcaaattcttacggcggaatgaatatcatcgtatgtctatctatcattattgcttagacaaagagcaacacaagtatgacaaaaaagggcataactacctttataatcggctcattaaagaaagccacaatgagtcaggcaatattgagcaacaccttccatatcaaattcgtaccatgctgaacgatgcaaaagatttcaacgactacttcctgagaatccttaatgcaacccataagattctcaccgactggaaaaatcagttaaaacagggacgagaaccaaataattattatctgagtagactcggtttcacaggtggcttaactcagaaagttgtacacacccgcctgttgccattttccattcatcctggtattccggtgtcatttttttacagaacagaaatgaaccagaatccttcttttaatctgagcgcaaaagtgtggaatagcgaatccccatttcgtgttggactgaaagaatccaactaccaatacgctaagtacctcggactgttcaatgagatcaaaacccaacgtaaaatcattggcaagatgaatcagttaatagccgaagatgccttactgtggcagatagcgaaaaagtaccttgataagtgtcatcccaagttttctgaaataatcaatcagcaggtaaacggcaaacagcccttaaacgtcaaggccatacacgacacggaattaacaattgattttccggttgacaaaaacttgtatcaggtggttgtgaaaatgaaacaattggacgacttcatgtttatagattcaaagccggtgctggagaaaaccatccgctacatgattaaaaatagtttacgtgacaaggaatatcaacagcgtgtgttcatagaaacaaatcctggcgttttcaagattccgtataatgaagtggtagaagctatgcgcactattaatcatcaagcactgacttgggctagattactgttagattgggaatccaaaacagttaaaacaattccggaagcagacaaaaaagcaaaactgcaggaagcgtacaacaagcggcagccggccttctttaattttaacgatatatgtagatacgccgatgatggaaaacagttgaaagatctgcgcaataaaacttttcacaccgaagtacctgagacctggacgtacgatgagatgcgtgagaacaaaacgatcaaaatggtcctgggcattaacgaaaccaccttcttgaagaaagattacgctattgaaaatgctcgtactattgaataa

SEQ ID NO: 317 - DNA, 3312 bp, synthetic construct
  source 1..3312: mol_type = other DNA
atgcgtaaaaattatcagacgaaaccaaaagccccaatttcaactgatcagctgttcaccggtgcaaaaactccggagtacgcagtgttttacaatatcgcctattggtggatgtctgaaatgttaaaacgattatacaaaaacacagataccagcatccacgaagatacttcaccctttatccagcgatttgttaatgatggggaagaaattaattccagtatttttagtgatgcagactacattaagctgcgtgactatctgtggaaaggctatctgtttgataaaaataagtccggctctataataaccttcaaagacaaggtaattattcataagattattgcgaaactggcagaaattcggaatttccactcccactattggcatgataacagcatactgaaatgtgatgaggacttgaaatcttggattgattttcttcataattacgccgtcgataaacttcgcgttgaatattctaaagaaatcgaaagatacgaatcgaatcgagataatttgtttgacatgcatggttcggattattttattactcaagagggcagaaattttttcctttcattctttctgaaaaaaagcgagatgagtcgctttatgcagcagcgtaaaggttgtaaacgcaatgataaaccggagttcatgatcaagcatcaagtatatcgttattatacgcacagagatggagccagtcgcaatcgttattcaatagaagaaactgttttttctgcccttgacccagattctaaaagtgaaattaacaaagcccgtcaagtttacaaaatgttagcatatcttaatgatataccttccgaagtcattgacaagaagctgtttccgctgttgctgaatgacgaaattgttgaagattcgacacagattattaagttcattaagaaacacaaccttttctcgaattgcaaatttggtattatcgaagattctaaaggggaagtcatccaaaaagaggttctgtttagttatgtggatagcaagtataatttccgaatacgtattgctgctctgcataagcttatcctggatattattcgtaacagtaaacgcgaagaagaattctataataccctgaaaactttcggggattttcgtgatcagtttccaattatcttagacgatatcaaaaaaggtatcggcaatattgaggaactgaacgaatactatatttttaaactcaaagcggatgacaaaaccagaggactgttaggtaaagtgattgacgactacaataagaatcagtttatcaaactgaaagactataacgaactgaaagagaaaagcgtggacgagccaatccaattgatctatcataatttttattttgaatcaggtcagaaacctcgctctggcaatcaattcatggaatttgctgttaagtatctgatggataaaaatcttgttccgaattgggaatggctcttagaaaagtatgagtctgaggaagttgaaaaaaaactcgagaacaacaatccgaagaaagtagtgaaacacataaaagcctatttttcatatatcccggatggttatcgcctgcacttcaaggaagatcacgttcttctgcgtttaaaatacgagtcagaaattatcattgaggtgggggaaaacgcgatgaagaatcttttaattactcactttcatggcaaacctatcaatgaagtcgtcgaaaagaccgtaagcgatataaacaagataaaacacgtggcgaaaaacaacaaaacattaacagagaaacttgagctgttaaacgacaagactatacctcgttatttgaaactgatgatgcatgacgaaagtgtaatgcagaatgagacaattaactatagcattatacaggcgaaaaatcgcatcgatcgcctgattgaatactttgaagatcttcattcagataaggtcaagcttaatcggagagagattaatatccagctcatccgttgttacaaatatttcgattggaattatccgaacaactctgagtataagtttctccggcaaaatgaataccaattaatgtcaatctaccattacacgttggccaaaccgaaaaacgctaaacaccatctgttgatactgcggaaggaactgtttggtgacatcaataaacatctgccgaccaacttgaaactgatcctggaagaggccacatccatcgatgaactgttcaaaacggtgttactggaaacgataagccgcctgaacaaatggaaaaatagattcagttctatgaattcgaaccagaaaaaagattgcctcagtaaacttggtatacatatcccgaaaatcccggtccctgacgcgtcaaataaagcaaatcttggccagatgaaaaacttgccctttatgttacacccgagcttagtttttatgacttttaagtattcccgttctagcaccatattctcagaataccgggacaatcccaaaaacagcaagggattgttaatggatcattataactttcagagctatctcgatttgcattccgttttaatagatcagaaacaggctcataaaattgtggggacgattaataacctcaaaactttagacacgttaatatggcagatgacaaaaaagtacctggacgataccacgagcgatatattgaaaaacattaccaatgagctgattaacagctccacagagaacttcaatgttaatcagttgcataactttgaatttcccatttttaaaagtgacaaaagtgaggtgaaacctttcaaagtgatagtcaagttcaaacagttagcggatttcatgctcattaccgaaaaacctttaaaaaatgtagctctgcaattattcaagcgttatcaaaccaacgaggagttggagaagctcgaggtgtactttaagaatggattttatgagataccctatgtacagattaagcaggaaatggaccgcatctatcgggaatccctgattttagcagattttattttggattgggagaagtcgatcgtggataaaatcccagagatcgaaaagcaaaagcttatcgaatcggcgaaacaaaacacaaatggctataaggcgtatatcaattttgatacggtttgcaattatgctggactcattaaagaagaacagtcagaactgcagaatctgcggaaccatgcactgcatgctaaaattccagataaagattggacatataaacagaaactgaacgacaaccgcattcaaaaaatgctgtacattaccttagaaaaactcgaaaaatacgaaaaaaagaatgcatactacgagtccaaggtacttcataacacatattaa

SEQ ID NO: 318 - DNA, 3279 bp, synthetic construct
  source 1..3279: mol_type = other DNA
atggaaaaaagtaagcttgataatgagatgacgtttgccgaggatgcctattactttgcgcattatgcaaatatggctcgccataatgcgtatcttattctgaatcacatcaataaaagtatatttggcaacgagtctaccttaaaagaggagaaccttcagattgctattattaaaatacttgatcctaaaaatggagccgaccaccatgctaaagcgattaaactgttgaatcatcacttcccgtttatcgcctgctattataaagaagatattaaaaaagccgtggagaatagcgcatacaaagagatgaatgacaaaaaacttgatcaccttaaggaacctctgacgctgaaacagatactgaagaccctgactggcatccgtaatgaactcaaccattatgggtattcccgtaaagaacacccaatcccgttctttcaggatctgtttaatgactcaattcaattggcgaaaaaacgcatgatagagttcaatgaaacccgttttaatagcattcaggattcaccgtatcataaaatggttgatcccaaagattccgtcctcacggacaccggcaaactgtttttcttgtgtctctttcttgacaaaaagaatgcgttcgaaatgttggcgaaagtaaagggttttaaaaatcggaccgacgaaaaataccgtgcaaccctggaatgttatacgcaattatgttgcaaaactccctatccgaaactggaaagcagcgatatcagtttggatatattaaacgagttgaaccgttgtcccaatgccttatatcaggtgctgtctgaagaagataagctgaaattcaaaaaagaaccaaatgaagaaactgcggaagagttaaaccctattatgaaacgttatgatgatcgtagtgcttatctggcacttcggtattttgaccgtaccaagtgtttagacaatataacatttcatcttcaactcgggcgtaaagtgatgggtgaaccgcacaaaaaagtgtttgacggaaaggaacgcacccaccaaattttaaaagaaatgcgagtacatgataaacttagcacgtatgagactgaagaggcccagacattttttcagtcaaagattgagtccaacgaagttgaattatttgcgccccattatcggatggttggtaatcgaattggcttaagttttggtactccgtccgaaaaaaaagaaggttattcgatccctattaataatcagccagccccgcaagctattttgtctaccagtgaattgggtgcattatacatctacaatcgactgtacaaggaaaataaaatcactcaatcaccgaaaaacctgatgtccacttatcttcagaccatgaaccgttttattaaagattggaaaaacgatggtatcaaaccggagaccagttcgaacaaaatcattaaggaacgtaatcaagaacgtacgaaacagacgatcaatgaattaaaacgacgtacggatcatctgcagaagctgctggacgagaaatatgcagggctcaaagttaagcaccttccggatatttgtagagaacatctgttaaactatcaatcagacgataacatacagcaggcaattgactttcttaagaaaaccctgtcagacaccaatttcaaaaaaaagcagctggaacaatttgagcggaatatggtctaccggagcagcaattcaaaacagttaaaaataggcgaaattgcacaggaattggcacgcgatatagtcttctttttgaaacctattaaaaaggagataaccaaccggaataaagaaaaagtgaccgtgttccaaaaaatcaataatcaggacttcgatatcctgcagaatcggctggcttacttttccctgtataaagaagaattgtgctcgttctttgacgatctgctgaagaagaagcacatgaaacatccattcctggagaacgtcaaggcagaaactaagtggagtaacggcctgattgaattctatctgaaataccttgaacataagctcaaatggctcaacacatacacaaaaaatgctcccaataatacaacacgcccaaattatacaacgagcaatcgtattaacaagaatcgctctactccaaataaaaaggatgagatagaggagaaggaaatcgaccctgagaaaatcaaggagacattcatagagaagtacaactactttctgaaagtgaaaacctcgtcccccaaaaattatcaggggaaggctatttttattcctgtcgggttattcaatgacgcgattacaaaagcgatgaaagaaagtggctatcaggttgaagatgatgaaaaaacaccaaatgctgcttattggataaaaagttattttcatggtgcaacacagcctttttatcagttaccgagatattataatcgtgccaaaaaagatgaagagcgcgatctggttgaggcggcgctgctgaaaaaagagataaaaaactactacgttaaagctaacaaaaagacgcagaatgactttaagcagttagccaaacggattagaaaacaagaggaagaaatcctgacacaacaaacgtcggaccgagttttattcatgatggcaacagatttgttgaacggtggttctgatggacgccagaccatagaatgcgaacaaattaacacgttagggttcaaccttggcgaaaacaaaatattagatgagaacagaaaagtatctatgaacatctacggacgcaaagttgtatcagaacttccaattaaacgttatggcgaatttcgccgctttatgaaggatcgccgcctggaaaatctgatcaattatttcccggaaggaaaagatattgagttaggcgtattaaaatctggtgaagttgaagccgttggagaaagattttctagctctactctggccaacgaactggaattttttgattctcagcgctggttactgatgaaatcaatctacgagtttgaaaaaaagatctacactcacttcttcgatgtactcaccaagaatgtgccggaaaaggagatgatggagaacaactatattgcccattatcattacattgaatgcgcaaaaaagttagagttatccgtctcggaactcgagaaggacgattttaaagaattgagaaacaaaatccagcataacgaaattccttactcacagtggatcaagaatagaattagcactaaagatggtcatcttatcacaaaacagattgtggagctggtgctgagcatctatcagcaaatgaacaacgaactcgatcaactcattcgcaagtaa

SEQ ID NO: 319 - DNA, 3402 bp, synthetic construct
  source 1..3402: mol_type = other DNA
atgaaaacaaatccgttaattgcatcttcaggggaaaaaccgaattacaagaaattcaataccgaatctgacaaatccttcaagaaaatatttcaaaacaagggttcaattgcgccaatagcagaaaaagcgtgcaaaaattttgaaataaaaagtaaaagtcctgtgaaccgtgatggtcgtctgcattatttttcggtgggacatgcgtttaaaaacattgatagcaagaacgtgttccgttacgaactggatgagtcccaaatggacatgaaacccacacaatttctggcactccagaaagagttttttgacttccagggagcattgaacggcctgttaaaacatatccgaaacgttaatagtcactatgttcatacgtttgagaaactggagatccagtccatcaatcagaagttgatcacgttcttaatagaggcgttcgaactggccgtaatccactcatatctgaacgaagaagaattatcctacgaggcttataaagatgacccacagtccgggcaaaaacttgtccagtttttgtgtgataagttctatcctaataaagaacacgaggtggaagaacgtaaaaccattttggcgaaaaataaaagacaggccttagaacatctgctgtttattgaggtaaccagcgacattgattggaaattattcgaaaagcataaggtgtttaccatcagcaacggaaagtatctctcattccacgcgtgcctctttctgctgagtctgtttctgtacaaatccgaggctaaccagcttatctctaagattaaaggttttaaacgtaacgatgacaaccagtatcggagcaaaagacagatcttcacgtttttttctaaaaaattcaccagtcaagatgttaatagcgaggaacagcaccttgtaaagtttcgcgatgtaattcagtacctgaaccattatccgagcgcctggaataaacaccttgaattaaaatcaggttatccgcaaatgactgacaaacttatgcgctatatagttgaagcagaaatctatagatcttttccagatcaaactgataaccaccgctttcttttgtttgccatcagagaatttttcggccagagctgtctggatacatggacgggaaatacaccgatcaatttttccaaccaggaacagaaagggttctcgtatgagatcaatacttcggctgagataaaagacatcgaaactaaacttaaggctttagtcttgaaagggccgttaaactttaaagaaaagaaagagcaaaatagattagaaaaggatcttcgtcgagagaaaaaagaacagcccaccaaccgcgtaaaagaaaaattactcacgcgcattcagcacaatatgctgtacgtttcgtatggtcgtaatcaagatcgttttatggactttgctgcacggtttttagcagagaccgattatttcggcaaagatgccaagtttaaaatgtatcaattttacactagtgacgagcagcgcgaccacttgaaggaacagaaaaaagaattacccaaaaaagagttcgagaaactcaaataccaccagtccaagcttgttgactattttacctatgcagaacagcaagcacgatatccggattgggacaccccgtttgttgttgaaaacaacgcaattcagattaaagtgacgttgttcaatggcgcaaaaaaaatcgtctcagtgcaacggaatctgatgttatacctgttagaggatgccctgtatagtgaaaaacgagaaaacgcaggcaagggtttaattagcggctattttgttcatcaccaaaaagagttaaaagatcaactggatattctcgagaaagaaactgagatatctcgcgagcagaaacgggaattcaaaaaactgctgccaaaacgtttactccatcgctattcaccggcccagataaacgataccacggaatggaacccaatggaagtaatactggaagaagcgaaagcgcaggaacagcggtatcagcttcttctggaaaaggcgattttgcatcagaccgaggaagatttccttaaacgcaataaaggtaaacagttcaaactgagatttgtacgcaaagcctggcatctgatgtatctgaaagaattatacatgaataaagtcgctgaacatggtcatcataaaagtttccacattacaaaagaagagttcaatgacttttgccgttggatgtttgcgtttgatgaagtcccgaagtacaaggaatacctgtgtgattactttagccagaagggatttttcaataatgccgagttcaaagatctgatcgagtcaagcacgagtcttaatgacctgtatgaaaaaacaaaacagcgctttgaaggatggtcaaaagacctgaccaaacagtcagatgaaaataagtatctgttggccaattacgagtcgatgctgaaagatgacatgttgtacgtgaatatctctcattttattagctaccttgaatcaaaggggaagatcaaccgtaatgctcatggccacattgcatataaggctctcaacaatgttcctcatcttattgaagaatattactataaagatcgattggcacccgaggaatacaagtcacatggtaaactgtacaataaacttaaaacagttaagctcgaagacgcgctgttatatgagatggctatgcattatctgtctctggagcctgccttagtgccgaaggttaaaactaaagttaaggacatcttgagctctaatattgcatttgacattaaggatgccgcgggccatcacctgtatcatttgctgattccctttcataagattgatagcttcgtggcgttaatcaaccatcaaagccagcaggaaaaagatccagacaaaaccagctttctggcgaaaatacagccgtatcttgaaaaggtcaaaaattcgaaggatttgaaagccgtatatcactattataaagacacacctcatacattgcgttatgaggatcttaacatgatacattcccacattgtgagtcaatctgtccagttcacgaaagtggcgctgaaattggaagagtactttatcgccaagaagtccattacattacaaattgcccggcaaatatcgtacagtgagatagctgatctgtcgaattattttacggatgaagtccgtaataccgcttttcattttgatgttccagaaactgcatattctatgattttacagggtattgagtctgagtttctggatcgtgaaattaaacctcaaaagcctaaaagtctgtctgaactctcaactcaacaggtgagtgtctgtactgctttcctcgaaacactccataataatctgttcgatcgtaaagatgataaaaaggaacggctgtccaaagctcgcgaacgttattttgaacaaattaattaa

SEQ ID NO: 320 - DNA, 3951 bp, synthetic construct
  source 1..3951: mol_type = other DNA
atgcctactacgaacaaccaaaaaaagaaagctgattcaatcaaacgaacgtctccatccccctcacgtatcaatggggtcgcaaaaccccgcccgcttgtcgttgatgagaacaataaacatgttctcgggggttatttcgggctgggcctcaacaacttttacaaagcgaccctgagcatatttgcgcgtacagggattaaaattgcctcaaaaaatggcacggtgctttatccggaagagaaaataggacaagtgatacgggtcctgcggcgttcaatctcggacactagcggtaatcttacacatgaagagaaagtatggtcgaatgcttttaaacttagttcttcccaggagatgcgcctgcaaaaattgattttccatcattttccgatcttaggtcccattatggcagacgaaggtgcctacaaagcaagcactaacaaaaaatcaaaagtgacggatgcttactctatgacctacggcgttaccctggaagaatgtttggacgttcttggcgatcttgcgcagaccttggtcgattgtcggaatagctatactcatttttatccatataacagtaaagaatcgacagcagaccagcttgcgctgcagagtaaaacagcccgttatcttgataaagtgtttaccgcatcccgtcggctcgataaggatcgtaacaatatagatactgccatgatggagttcataacagggtctgctcgaaatctgcgacagtatgtcgaacgttatggtttttacccaaagtatgacgagacagtgacctatgagaaggatacgcggggacgtgaacgcatgaaaaagaagatgactgagagagatgatttcttttacaagataggtaacgaaaaagaatgtgacgggaaacggtatacagtcctgtctggtttcgggttatcctttttttgcgcggtatttctgtctaaaacacagacacgtaatatgctggccgacatacgattatttgaaacttcaccgtatcctaaagaactggatgacattattcgcgatatgatgtcgatctaccgcattcgggcccctcgaggcaagaaaaagctggaagctggaaatactggtgtaaccctggcgttggacattcttaacgaactgcgtcgatgtcctagagaactgtatgatgttctgaccactgaaggtcgtaagttttttgaagatgaaacggaccgtactaaagatgctttcgtcccagatgatgccttatcaccgtacacgagtgctgacaacgctagtgaaaccgtgaaacgcattcgatggactgatcgtttcccccaattggttatgaagtatgttgacgagaccgagttctttaagaacatccgttttcaagtgcgactgggtaagtatcggtttaagttttatgataaactttgtatcaatggagaagaggatcttcgtggtttacagaaagaaatcaatggttttggacgtattcaggagatggaatctgctagaaaggaaaaatatggggacatgatgcagccggtggaatcagagagaattcgtattgatgacgatctcgaactcgatcttttacagtttgcggaagatagccgtgattcgagtccgtacatcacagactctcggacggcctacaatattaacaataatcgaatcggattgtattggaatgaactgacagtgaacggtcgcacaatcccgaaaccaggcgaccatcttcctgacctgggattaactcctgagggcaaggcggatgtcgatatgcctgcaccgatggcaatgttgtcgttacacgaattacccgcgatggtcttttatcagtatctgctgtcccaaaatgctgacccgaatgaactgaaaacccgcagcgccgagaatcttattattggcaagttcaatagcctgcgccgtttattcacagacattagcgaaggtcgcttagcacctctgccggaagatggcttagttcgtgtattagacgaccgctatggattaacccttcgtgagatccccgataaacttacggatttcctgactggaaaaaaaggtgccgatcagtcaaaacgccgccgtgttgtggcagagcgcaccttactcgaaagcctgcgtaaagctattcggcggcgcgacagatacgaagaggaccgtaagaagattggagagaaagataacaagtatgcaaaaaaagcctactctgatgtaagacacggttccttgggccgttacctgagcgaaagtttaattgagtggcagccgacattagaagggggcaaagataaactgacaggaatgaactttaacaaacttcaggccgagctcgcgacctttaattcacctgagaaatatacacgtctcagagagaccctgtcggcggcaggcatgttatctggtcctatagcgcacccatttttgcgcaacgtcaccaatcgtaagatacggaatatagaagaactgtatcttatctatcttgaccaagagattggctacctgaaaaccctgctcaacctgggttacaaaggcggtcgccgcgacgatcggaatatcgattttgaagcgagcaccttgaaaacgcatgtagatgttcggaagctgccactcgttaagggtgagaaacgttgggaaaaaagaactcccgactattgtcgcgaactggcaaaacgatatctggaagtagatggtagaagaacttccatttggttgccagaaggcattttcagtaaagcaataaccgatctgcttactcgtcattattcaggtaatgatggcctgatggatagaatgcgcgatgattctttaaacaacaacgttgcgtatctgattaatgccttcttcgaaactgttctggatgatcattcccagccgttttacatgagttatgatattgataaaaattctggaaaagaaaccccgaatagatttgccagagtttatgaccttttcgacatcctgaacaatcggaagattagaaatgccttagtaaaagtgcccatgacctgcaaccaaattgcggagcgctttacggctaaaaatcgcgacgggcgtaaacgcattctggcggagattgacgatcgtactgccgggatgaccccacgtgatatcggctctcatgctagtttgaaggaagcgaaagaagctatgcgtagacgcttaacgcacatgatcggcgatgtgaaagataatgaacgctgcgtgcgtcgctataagacgcaggacatgattctcttcctcatggccagtcagctgctgggggatgcaatccgcatggaaaaaatcgatagcttagataagtttcgactcagcgccgtgtgcaatgccggttttttgaaccagaccatggatttcgaatttccagttcaaatggatggaaacgttatctacattcggcaggacaatatgtctttgaaaaattatggggagttttaccaactgctctcggatgaccgcttaccatcgttattggaaaaactggcagatggtggcagcgatagaattgattatggcaatctgatgggcgaattgaccagttatgaccttcatcggtcccgtatcttcaaagcagtgcacatgctcgaacgtcgtgtaacgtcagatcgacaattccgtatatttctgaataatccttgcgaccggagattttacattaacgatgatgctagccgcatggcaaaacgcaataactttcgttccttactgatgctgttagaacagtcagatacagcaagtttgacggagtccgagcgtaatttgataatctctatacgtaatgctttcagtcataatcactatagcatcgacctgccgcgtattgcgccggagaaacggctgcgcaaaacgacgctgcttaacaaagatacacggccgttaggagaaaaaaaagcatcattaacaaccattgctacattgatagcggcacgcttagaagagttacagaaaaaactggaatcaaagcactaa

SEQ ID NO: 321 - DNA, 2961 bp, synthetic construct
  source 1..2961: mol_type = other DNA
atgaaaacaaatcagcctaaaaccatctattataactggaaagacaaagctgattttgcttattttgcattttacacgtcacaggctcttaacaacactagtattattctgaagaacatttcggagattatagagaacaaggttgataagactaacgatgacaatcagcttttctccaatgcacaagtaattaaaattttggaaagcaataattctgtcgcacaaaaatcagtcattaatctcctggactctaatcttccgtttagcgttaaaagtattagcgatccttttctggtcaaaaatcgcctgtcgtacttcttatggttactgaaaaactttagaaatgaatatgcacattatcacgaacgggaactggattctcgtaccacactggaccgagaagaagatttcaaaaaacgcgaaaatcttaacaaacggtttagtaagtatgacttcgcggatgaattactgaaacttaaaaaaagcgcggttgaagagctggaaaaacgtctgaaaataaacaacaaagaattagaaagcgactctgtttacaagtcttttaaaaatagatttctgaagattagcagcagacagaatttcacggaagaggactttattttttttctgtgcctgttcctctcgacaaaagagacaatgcagctgttaaacggtattaaaggtaaaaaaaatacaacaactgaagaatttcagtggattagacgtgtttttaccatttttaatgccaaacgttttcagaacaaaattaaaagcgataacccaaaagaagcctttattctgaacattgtgaacgatcttgcgaaaataccaattcatctcaaaaaatatcttactgaagaagcaaaagagaaattgatctatactgtgcaagaaaccgaggacgaagaaggcaatattttagaacagaaatctgaagcagtgaccaagcatgacaaaatgtttagctatcggtgtctgcagtatctggaactgtttgggtttgcaaaaaatatcaatttcaacataaaccttggcaaagtgttcataaacaaaccctacaagaagacaattatcaacgacgaatatgatcgttttttagataaagaaatacatacgttcggtaaactgaaggattttgatgactcatattttgaaggttatatcgaaagaaaggaaactgagaatggagtagttaccacgttcaaacaaccactgaaattttactccccgaaatatcatttttcaaacaatcgtatcggtattaagctgtacaacaaaaatttgaaacttgaactcaaagagtatgatgaggatggcaaatttgtagttattaacaatcaacccgattattttctgagtgagaatgccataccctacttcacctactgtatgatcaattttggagaggataaaaccttaggagtcattaagaatttcgaaacaaatttcaaacgtttcctcaacgacgtttctattggaaagagtattaaagtgcaggagattgaacagaattactctttgaagataggctggatcccgtcattaatccgcgataatctttttcacgataatgataagacgttcgaggatgtcgttaaggaaaaaatcaactcgttaaaagaggagacgcagaagttgattgaaaataacaataagaaacctgaagatcgcgatcgtaatataaagttttcgtttaaaaagggggatcttgcaaccttcgttgcgaaagacattatctattttatggaactgaaagaggaaatcgtcaatggcaaaaaggtagtgtccaagcttagttccattgaatatgacgtactgcaatcgaaactggcgttctatggtaaacacgaagaggacttgaaacttttattcaaaaaatggaatcttaatgaacgccatccgttcctgaaagacgtcagcatggaaaaagtggaagatcgccggggctttaaacggcagattggtatcaaaaaattctttaagaattacatctatcagcggaaatactggttaaacgacttgaaactggagattaataaagagaactatcattttgttgacgattacaaagtgtgtaagaatgacactcagattaaagcttatgcttcaaatctcttaaaccacactatctatcttcctaacgatctgttttctgatctgattttggagaatagtaattttgccgtggagaaagctaatacgaacttcttgataagtaaaaacctggaatattttggaaatcagtggttctacaataaggaaaattatcaacagggtctcgatacttatcaatcccatcttcgcgataaacagattcgaaaagcgatcaccttagatagattgtattggaacatgttaaagattaatacacaaataccggaattctcacaaatctttgaacagaataatctggccgcgtataattcagagcaaacactgttagaaaagcaaatacgcatgtcatcaaattttaaactggccaaagaagatttccgttaccttgattttgatcgagattttgaaataaagatagagggctatcgtaaaattaaagactttggtatattccgccatctgattaaagatagacgcgtaccgtccattttagccttttacacgaagtataagaaactcgggtccatcaatgaggagatcatccgcaacgaaattctggatttcgagtattataagatcagtatcttgaaacgagtgctggagatcgataagcagatctacaacaatctgatcgggaagaatataagcattcacgagaaattttccgaaaacgtaaacaaactgtacttggaaaatcagaaactcgccaataagataatagaaattcgtaacaaacttttacacaacaaagttccagagatcaatttggaaaacatccagaagacctttagtgaaaccttatttttagaaatggagaaatcttgcaatgagttagaacgtctcatttga

SEQ ID NO: 322 - DNA, 3204 bp, synthetic construct
  source 1..3204: mol_type = other DNA
atgaactttgaggagaatgggaacaagtatctttttggcgcctttttgaacaccgcctatgacaattataatgaagttatctcacatatctacgatgtcattcggcgcataaccagtaataatcctactgaacaaatttctagctctcaggctttggtaagtgccgaagagcagaccagtagtgatgaaaaagacaagaacaaagaacgaatgtccttcgtttgtacgtttctgattaccggcaatgcaacatcacgcaaaattgaatcgatgttaaaacgtgcatttcctttttgggatgatcttattgaaatccagacatctatgagcatgcaactggataagaccgagtcaatttttcaggtgcagaagaattgcgtggaagaactgttcacagctctggaatcctggcgtaattataccacccattatattcacccagaagcaattgcgtccccgaccattaacctgctgctgaagtcgtgctttaatcagggtatcaaggagatcaaaaaacggttcaacgcgcaggacgagcagttaaagcatctgtatgaggcagaattttcttacaatcgcgaaaccaataaagatgaagtgaagtgctatcacccggcgaactattataagttcacggatgagtctgaccttctgaccgataagggactggcgttctttacgtgtttgtttctttataaacgcgagagctacctgttgctgaaccagctgaaaggcttcaaacgtgccgacgaagaacgttatagaatgacgctggaagcgtttacggttatgcgttttcatgctccgaagcagctgatgaaactgcagcaacagcagattgataaagtatcgttgggtatatcaatgataaacgagcttgtgaagtgtccaaaagaattgtatgactgtatagaagacgaacagaaaaaacaattcgaggtctatccaaatgcagaaactgttccagatgaacaagaagccataggcgaattaattcgttacaaagatagatatgagattctgatgttaaaagccctggaacatagcagcgagtgtaaaaatatgggattctatttgtcactgggtaagtgctatatgaaatgctatgaaaaacattatatcgatgggacgacagacaatcgttatattgtacatcctctgtacggttttggaagattacaaaatgcatctactgatcataaaaaccacctgtcgtcgtttggtgaagagttacagactcattctcaattaccggtgtgtcattttgcgacagaggatgatgcagcggatagcccaacatccgttccgtatatcagtgaatcttacccctcttatgtcctgaacaataataacatagggattaagtggttgaacagtagtgaaaaaacggagtatcccaactttaatcttaatgaaggtaaagtttcttgtccaacgccggattattggttgagcaagtatgagctgccggcaatggccttttatgcctaccttaaagagaaacataaaaacaagcttcaggaatatccttcgattaaagagctgatcgatcagagtcagcccgagaatactaaaacctcttcaaaaactatcaaaagtcgtctcgaggaacgactgaaaacatataaagttgatgcagctaaaaaattaaaacgtttagcagagaaacccgacggcgttcagtccgggcgtctggcggatgaactcgcacgggatatattatggctgcaaccatcctcacctaaagaagggggcaaagataaacttacaggggcgaattttcaggcgctgcaatatgctttagctcgctatgggtttatgagaactaccttatcgcgcatttttaccactgcgggtttaattggtagtggcaatgcacatccttttttagataaaatcaatccgcaggattattctaagcttactgcgtactacgttggatatcttaaacagaaaatcgtctatatcgacaagcaactggaaaaactcgctagaggaaaagtgaacattcaattccaccccacacgaaaacttatcaagcaaagccagattaatacaattgaaccggaaaaagagactgtatttctgccgcgcaatatcttcacagaaaaaatagaacaagccctgtgtcagatccagggtaactttaaaagtaatatagaacgcgctaaaaccagcggcaaaggtgtcaatgcatccaaactgattcacttctaccttgaattgtatcttaaagacgccgtaacggagttttacaacataaaacgtaagtactcctgtctttgctacccgttgattcctagcgaaaaatacaatcttaaagaatatcagaacaccgaagagagatcagagcgtatcgaccggattaaagatttttacaactttaaggaagtgacaaagaaggcatgcaaaggccaagaattgagcgaagatgagaagaaactgtacaaaaagtacatcgaactccagaaggtgatcgataatgagaagatgattcgcttacgcaaagtacaggatataactctctacctgtggatgcgcttattcattgaagaaaacccagagcgtattgtgttcaataaaaacgaccgaccagagaatagcttattaaaactgaaagaaatggacaatacaattctcgaccacacgacggcccgcaaaatcaatattgatacccctaatggaaacgtcacaatcgaagatgaattcaagattaaagattacggtcgtattaccacactcactaccgaaaaattaccgcagtcgttaattaagttcataggcattttgaacaaaccgttagacaaaaaagatcggccgtcattaagctattcatatatctaccatgaaacgaatgctttctatcgatatcgccccgagattattaaaatggctcaggacattgaaaacaaaattattaacgaactcaaaatagacatacaacctgaagccgagggttattataattttcggcaaatactggaagaaatcaaagagaaatcctcagatattaatttggagttactgataaagatccggaatgccttttgccacaacgaatataaagagctcgataatgatcaacataagtatctctcaagtctgttcaaaccgatagccgacatcaagcagacggctactctggcgtacctgctgcacatgctctttgaaaccgaataccagaaagttatgatcttaaaataa

SEQ ID NO: 323 - DNA, 3189 bp, synthetic construct
  source 1..3189: mol_type = other DNA
atgagtataatgaacataattacggtactgaaccatattcaccagattgcaggtctgaaacgaaatgagttaggtgatgatgataacatctattcacatcctgtcctcaaatatattgctccagagaacaatagcaccaccctgccggaaaaacgggacctcattaaggaattgcttttagaatatctcccctttttagaggcgatgaaagactgctacaaagaagtaaaagtagagaaagataaacgcaacaataagtatgtgaaggataaaaaacaggtattcatccggaattatagcgacatctattgtatctattggacgctgtacaacatttttagtaccttgatcaattaccgcgataagagttgtcattatcgttttattccgtctaaagatcaagaagagtattccaaaagaacagaatatgatacagttcggattattaacaaatactatacgtacgcccttcgcaaaacgaaagagaaatatggttataccaccgaacagttgagcttcatacaaaataacagatacacggacgataagaaagtgaactttaatttctttctttccatgcagtcttcgaacaataacctgtcacatgtgggtgtagcccagttaatatgcctgtttctccaaaaaaaggacgtggacaattttttagaaaacctgcctatctatgacaatcgctattgtctggggattgatgaacacatgattattaaacgttcactggcgctgcattctattaaacttcctaaagagcgtctcaactcagaaaaaaaggatatggcgattgcaatggatatgctgaacgaactgaagcgctgtcctaaagagctgttcaatactctgcctttcgataaacaggaacgtttccgcattattagctcggatcataaagaagtcttgttgatgcggagcaccgatcggttcgtgcccctgattttgcaatatattgactgcaacaaaaagttcaaagacatcagattccacgtcaatatgggcaaacttagataccttttttcaccgaataaactgtgcatagataatcaggaacgtgttcgcatgttagagcatcttcttaacgggtatggccgtatagacgaggttgaatatctgcgtaaagcgccgaatggtacttttggaaatacaaatattccaattaaaggttttggcgagattgagcgggatagcgcagactctaataattatccatacatcgttgatacacatacgcactacatcttaaacaacaataaggttgaattttgcttttgtgaggacagcaaaaataaaaacgtatttccaactatagaaaaagagattaacggcaaatggtatgtggaaaaaaccgcccctcattgccgaattagtttttttgagatacccgctatggccttccacatgtttctgtgtgggtccgaaaaaaccgaaaaactgatcaaagacgtgtataacaattatatctcgttgttcaacgctttaaagaacggagcattgacagaagagaattataaagattttaatatcccggagtgcgacatgcccaaaaaaatcctcgattttctgaagggtaaggcggaaggaaaaagtatcgacggatacgttaaaaacattctgaagaaggagttaaaagacacgagaaaacgcatcgaacaagcaccatcggaaaaagatcagatgccgtctaaaagaaataaaattgggaccaaaagttataaacgcgttctcactggaaaactggctgattttctggccaaagatattgttaagtatcagcctacactgtgtgcgggcgatgattatgggattgatcgtatgacaggtatgaattatcgtattatgcaggcaactattgctacctacaatgacgacgatgactttgatacattttacaatgtttttaaaatggccggcttagtcgatggagatgaacgaaaaaatcatcctttcttaaaaaaagtgttgctgagtaaaccccagaatacagtggccttcaatataaagtacctgaaagagaaggaaatctatcttcgaaacatcgaaaaaaagaacatcattccgccgttcgtcaatcgtgaaagaaataagtggtgtgaacgcgattgtgagtattatcgcattttaggtgaaaatcttttagacctgccaatagaactgccccgtcaaatgttttacaaagatattcgggcgcaactggaacctttaatgccagaaatagatttttctcagaccaatacaacttacctgatagctgaatatcttaaacgtgtacgtggcgatgatttccaggaattttattcatgggaacggaactatcgctacattgattttctgaaatgcattcgcgatgataatggtcgtatctgcgcacagtatactacaacagaagaacgcgaatcactttgggaagattctaaaaatcgtacggcagaatataaacggagcgaggaacaaaaaaacgagaagaaagataaaaattttgaagattccctcgaggagcgtatcagctcatcccatataaagtttcagaataccgaaaagcatatacgacgttataaagtccaagatgccttattattcatgatcgccgaaaaacagtttggtaagtaccttgatgatattaaggcgaaaaatttcaaactgaaagatattatgccggataccgacaaaggcatcttatccgaaactatgccgattgactttacgttcaccaagaaaaacatcaaatacaatatacacgcaaaaaacttgaaattcaaggagtacggcgacttgtttatcttagctaatgataaacgtttggaatctctgtggaagattttggccaccgatacggtgaataaggaagaaatcagtgaggaatttgcgaaatatgatttttgtcgcccggatataactaagctcgttctggacttcgagaaggatgtcctcgaaaaatacccggagatcattgaagaggctgagaaagaatataagaaatttgacttcaagtttattctcgactggcttattaacaagaaaaaattaaactacgggatccgtaacaaacttctgctgatacgaaatgcctttaatcacaattcgtatccagacaaaaagtacgcagaggttagagaactgccggaaatagctactaatctgaaaaaaacttttgacgagaatgcgaagaagtatgaataa

SEQ ID NO: 324 - DNA, 3192 bp, synthetic construct
  source 1..3192: mol_type = other DNA
atgtttgataatgaacagaaaaacctcgaaaaagaaccttattggggcgtttttcttaaccaagcgcgcctcaacgcctatattgctttgcgtgatattagcgaacgcttggaagaaaacgcggccgatgaggattctctgtccgagtggcctgtattaaaatatcttgataatgatactgacgcagtgaaaagtcgccgcatattcgaccttgttgaaaaacacttcagcatgttaaaaattatctatggtggcgaaaaagagggagatctggtcaaacgatccaaagagtacaagatcatactcaagtgcttattccgcgcgctgaacttctacagaaataagttttgccacatgtatagcggtaatcgcgcacggaagtacaacgagaaagaactgatcaagtatcttgaggattgttttgatgcctcggtccgtaaaattaaagagttacgacgtttagatgaaaaagacgtactgcatcttcggcggaaaattgccgaaggtaaagatgccaacaaacgcgttattgacaacccgcagtttcgctatcccttcaaaaatgaaaagggtgaactgaacgagaaaggattgtactttctggcgtcaattttcttagacaagaaagaggctcatgaattcttgaagaagcaagaatactttaagaacgactcggaacctaagtaccgcgccactctggaatcgttttatcattatcgtattaaacttccacggccggttatcgaaagcgatgtagacaaaaatgggttagctttggatatgctgaacgaattaaaaaagtgtccaaaggaactctttgatttgttgtctaaagagcagcaggaaaaattccgcgttgtcgatagtgaagatgcggacgaagaagggaacgaaatcttaatgcggcgttattctgatagatttccctatcttgcgctgcggtattgtgatgaaaatcaggtctttgaacgtattcgtttccaaatcgatctgggtcggtattactttaagttttatcccaaagaaactattgatggcaaaacgcaacaacgttccctcgataaacgtttaaaaattttcgggcgcatcaaggatgtaaaaagtaaagtggaacaagaatggtcaggcataattaaaagtccagatacaatagaagagaatccgaatgaaccatataagctgaaaaccacgccgagatacaatattgtagacaatcagataggatttgtaattaccggcgataaaaacctgccggacgtaaaacgtcctgatggtcgcattgaactggaaaaaccggacgggtggctgtccatctatgaactgcctggcatgttatttcatggtttgaagtatggtttcgacaagaccgaacgtatgataaagatctacatagaaaagcagcgtaaaatttgcaaagagatatgcgagaaaggtactattactccagatgatggcgaatccatgccggaagccttaaaaggcggtgccaaagcagcaaaacgtaattacagcgaaaaaaaattagagcgtatgttacaagatacggaacaacggattcgagccatacagacgacacagaaacgaatggatgagcctgggaataaaccaggcaaaaaaaagttttttgatatacgtgccggcaaacttgctgattttctggctcgcgatattatggcgctgcaacggtttgatccggctaaacacgggaaagacaaacttacggctattaatttccaggtgcttcaggcgactctggccttttatggcgcaaagaaagacgtaattgaagatatgtttaaaggtattggtttgctcgagggtgataatccccatccgtttctgaatcagattgatccggcacaatataactcaattgcagggttttatcaggcgtatttgcagaaaaagcgtagttatttggaagattaccgcaaagaagaggaatatgacgagcagtttttacgtccgaaaagacagagatatgcccaagaaaaaagagagatcaaaaccgttgctcgccagctcctggacaaccccgtcaatgttccaaaaaatttcttcaagaaagagatagaggaatttgtgtttagtcaggacccaagcctgaagaaatctaaaatgaatactgcgtacatgatccaggcactctttgagaaacactatggtcgtcaacaaccgttctattcgtataatcgaacgtatcccgttgtgtccaaagcaatcgagtatggaaaaaagggaaagaataagaaaatcgcgaaggtcttgatggcaatcgagcctaagcttaattacatggaaatcaaaaaaatcgtgaatgaaatgccggatgggcaatatgaacctgagaatcttaaacgtaacctttatgaaggatataaagactacgaaaaagatgaaagaatcattcgtcggtgtaaagttcaggatgttgtcagctttatgatggtggaagaaaccttaaaagaccagctggattttaatgggaacgtgctgaccttagagaagattaccccctgggaagcgtctccgttcaaaaaaccagttctgtgccatacaataatttcaattccgttcaacaccaaaggcggtcatacggataaagattatgttgattttatcaagaacaatttcgaaggcagttacgattgtgagccgaataaaatcatactgaagtacaaagtgacaagcaaagacactaaactcaaagatatcggtaagtatcgtatgtattcacatgatcgtagactgccaggtctgctgatatggaaataccgcccaaatgatcagaatggcaatgagataaagtttacagagatcgagcaggaaattaaagcattcgaacggcgccgaatagagatcgctcagtgtctgtacacactggaaaaaaaagttattgactcttggttcacacaagacgagctgggagaagagcacattccctttaacaaagtgattgacgtcattaaggcaaaaatgcctaattttgaagacaaatgcaacgtgttactgaagattagaaacgcaattaatcataaccagtttcctgtgtacgaacaggccatccagacagctcctggcaaagagattgctggaaaaatgttacgcatcaccgagtcatatatcgaacagataatggcaaaaattgacccggactttggacgaaccgaggatgcggaatcttcacgttaa

SEQ ID NO: 325 - DNA, 2430 bp, synthetic construct
  source 1..2430: mol_type = other DNA
atgatcaaaaaaccggctaatcgttttgcattacccaaagtcataattagcgaagtcgattcggaaaacatcttggagttcaaagttaagtatgaaaaacttgctcggcttgatcggtttgaagtcgaagcaatgcattatgatgagaaaaacgaaataatttttgacgaggtgaaagtgaatgacggcttaatcgaaatcgtttacaaggagaataacaaaaagttagtggtggagattgaaggcaaagcttatgaaatctcaggtcaaaaaataggcggcaaacagagattgttagagaatcgtgtgagtaaaacaaaagtgcaattagagctgatgaatcatattgaagatggagaggggaacaaacgggtgtcacgtacagaaagagagttgattgttttgggtgatattaagctttattcccagattgtagggcgcgaagttaagacaactaaagagatctatctgattaaacgttttctggagtaccgttctgacttgctcttttattatggttttgttgataacttttttaaagtcgttgggaacgaaaaagaactgtggaaaatcgattttaatacatctcacagtgaacagctgattgagtacattaagtatacctttaacgacaacctgaagaatgatcgtcagtatcttaatgaatacgtgactaatgacgtgcagattcagaaagattttaacaaggtaaaaaatgttttctccgagttgcgccacgcactgctgcattttaattacgattttttccagaaactgttcaacggccaggatgtcgggtttgaccttgatatcgaatttctcaaccttttcatagataacatcgataagcttaacatagagacgaaaaaagagttcataggagatgaaaaaattcgactgtttggcgaaaatctttcactggcgaaagtgtatgaactttattctcacatttgcgtgaaccgtgttgggttcaacaagtttatcaatagcatgttaattaaggacggaattgaaaatgaggctctgaaagataagtttagcaccaaattcaccggtaatgcctattatattgatattcataatagtcgggagtataaagacctctataagaagcacaaacgtctggtgattaatgttagtacccttaaagatggcagagcaattcgccaggaaaataaaaaaatcgccgaactgaagaaacaaatgaccactatgacgactaccaacagcctggcgcgcctggagtgtaaacttcggttggccttcggcttcctgtacaatgaatataatgactacaaagcgtttaagaattcctttgactccaacttgaaaaacaaccagtttgacgtttctaatgtagatacgtcaaaggcatatttcctgtctacttatgaaaacagaaaaccacgaacccgtgaacgaattgataaagttttaaaagagattgaatcgctggagctgaaaggactgattgcaaatgatccattactcaagtttatactcctgatgtttgtcttcatgccccaggccctgaaaggtgaatttctgggctttgttaaaaaatactatcatgatgtccacagtatcgagaaggacacaaaagacaaagaagaggatctgatagaattcatgccgctgagcctcaaattaaaaatcctgggacgcaatatacgcacattaactcttttcaaatatgccttaggatcacctatcaattacaattcaactgatgaagtattctatgtagaaggaaatcgttatggaaaagtctataaacaattgggtataagccataaccaagaggaattcgataaaacattgacggtttccttattacggtactactcagcactcttcaaactggtcaatgattttgaaatctattctttagcgaaaggtaatcctacagtggttaatcttgatgtgctggtagacgattcgtctagtccgtataagtttcgcggtttttacaattttggtaatatgatcgggcaaatacatgggctcacgcataaccagatcaaaaacgaagagatcatgataagaaacaaaattgcccactttgacatagaaatgttgctgaaaaagccactgttagcgcaaattaaacttgatgtgcagcgcaaaaatctcattaagttcattgaagaccgcggtgatatgaaatccgtattaggctatgatgctattaatgactttagcatgaaaatggtgcatctgcgtacgaaaatcaaagtaaacagtgataagcttcagataatgatgggcctgctgaccaatgttaaaaccccgaacgacttttacaatatctacaaagtaaagggtattgaaagcattaatcaacatcttttggatgttattggtgtcacggaatcggaaaagaagattgaaaaagaaatcaacgaaggtaataaacgagcggtaaagtaa

SEQ ID NO: 326 - DNA, 3441 bp, synthetic construct
  source 1..3441: mol_type = other DNA
atgatggaaaccattaaacaggaaataggtaaagaatacaatccttttaagaccgaggataagcattatttcggcggcttttttaatctggccgataataatattaaggaagcgtttaatgaggtttcgattcggcttagtcagaaaggtgcctctcccaaaacattaattgaaaaatacaccaaggaaaatgtcagtcttgtagactatgagcgctttgttatattattgtctgattattttccaataatcaaggagatcgaccagattaataaagatgaaaaagataataaagggatcctgatacccaaaacaaaaaatgaccgtattaaagattttgaagtaattcttgtctccatgatcgatgcgatagaaaatcttcgtaattattatacacatttctatcacgaatccatcgagattgataataagatgttctattttctcgataaagtgctctttaaaaccgtgttggacacgaaacgaaattacttgaaagaagataaaacaaaagagatgataaagaacacgctgaaagaggattttaacaagatctttaaccttaaagttgacgagtatttgaccaaagacaacctgacgtcaaaaaaaataaaaaaggctcggaagtatggtaatagctttgatataggtttgactaaagaaattactgcgagtatctacaatgatgccatcaagtatttcacctatgataaaaacgaaaaatccattctgtcagatagtcgcaagactgcgtttaatgaacgcgattatttttatcgtgataagaatttcgatctgccaattagctctagcggcattatatttttgctgagctgttttctgaaccgtaaagaaatcgaagacttgaaaagtaatattaaaggttacaaagggaaggttactaaaaatgaagaaccaacattagaaaagaattccattcgctttatgactactcaccgcatctattcaatatggcactataaaggactgaaaaataagattaaaacgagcgaaagcgccacaaaagaaacactgttgatgcaaatgattgacgaagtatcaaaagtgcctaacgtggtttatcaaaacctgagcaaagacctgaaagactcctttatcgaagattggaacgagtattacaaacataatgaggagaataccgagaacacgattaatagcaaagtcatccactctattgtgcgtcgccggtacaaggataagttcaactattttgctattcggttcttagacgaatttgtgaattttccgagtttacgttttcaggtgtacctgggaaactatcttgttgattcccgtcctaaagaaagtgcaaacgtcattactgagagagagattaagaaaaaaatcttcgtcttcggtaaactgaacgaagttaatcagctgaaaaatgactttttcagtaaaattgaggaagataaactggaaaccaatcttgaagtgtttccgaatccgtcttaccattttccaatggaaaactcggaagagctcaaatcggcgaacaagattggaatctatctttctgacatagaaaacttgctcgaaccgtttaagaaacatcttaacaaaaatacctcacaagagaaaatttcgctgatcgaagacattacccaacagaatgaaaatatcaaaattggccaaccgttagcctaccttagcatgaatgatatacacagtgtaatctttgaagtgcttaaaaatccgattatcaaagatggcaaaatagacggtaagtcggtcgagaaaaaaataaagaaccagatctataaacagataaacgagatcaagaacaaaaaggaagagagcaaaattatcaaaaactttcgtaaaaaaaccgaaagcgacttggaccttaaaaagatgattgatgatctgatcaaagaaataaaaatcactgacgacaagatcaaaaaactggacgaaaacaaaaaagagtactttgactatcaaaaaaacaaaaccgccaaaaaacgcaattacatattacagaattctgaaaaaggcgaaattgcaacctggctcgctaatgatattaaacgattctttccaaaagagttcaaagaaaaatggaaaggctaccaccatcgcgaattacagctgtcaatcgcgtattacgatacgcagaaacaaaatgtcaaactgctcttgtatggattagattatcgcaaagagatcccgatgctggatttctcaaagcccaactttttagatttttacgagtattatctgaaaaaacgaaagccgcaattatacaatcttttatcggatcttgaaaaattagagcgcggcgaatccattaataaggaaatgctgctgtctaagtactttaaactgttccgcaagagtaattatcagaacaaaagcttagatgataaaattaataccgcgctggcaaatcctatttttatcgaacgtggttttatggatggtaatccaacagtaataccgaatacaacaattaaagggaatgaatcgagatttgcaaattggttcgtggcttacaaacagtttgatgaataccagaagttttacaataccgaagaatatttcctcgagttaaaggacaaaacccctaatgaaattaaaaaaattcaatcacagatctacacgcagaaaaagaacgactgggcaatttggaagatgatctcatatatttttaaagacatcttcaaccaagatcttcaaaacgtgtcactgtctgagctttatcagaatcgagaacaaagattggagaatgagaaaaaatctaaagaaggagagcgtaagcagaacttcttttggaataaaacggttgatttgcagctgaacaacaaaattaatataccagaggttaaactgaaggatatcggcaatttccgcaagtatgagaaagatgagcggattaaagtttttctgtcatataacgatattacggattggatggcttatctgcctaatgattggcaagagaaacatacgattaagccgataaacgtaatagatattcagattgacaagtacgaaaaaatcagacagcatcatcttttaaaggaagttcagaatcttgaaagcgaaatctataacaaggctattaacaaagaagaattactgcaggaagatattaaggggaataaaaaccccaacttcaaaaagtatatagtgaatgggcttctcaaacagatcaaaggtctgaacgttgaaaacttcaaaattccgaacagtgataaagagtttaatgcactgtctgaagagacattgagatcctatactgaattagaacagaaggttactctcctggtcctcattcgtaataagttcgcacataatcagctgcctaataaagatgtatatgcattcacacaatccatacggaagcgtcagaaaaacgaaacgtatgccgaatattatttcaacctgtttgagaaaattagaggagagatttga

SEQ ID NO: 327 - DNA, 3174 bp, synthetic construct
  source 1..3174: mol_type = other DNA
atggaagagaataaagtccgctttacaaacacgtccaacgttaaacgcccgaagagtctgctgaaacaaatggggcacaaaagtacatttctgctggatgatactttaattgtaacttctgtggctaaaggtaaaaatgaagatcaaaagggtaaagaacaagccgcatccaaaagtaaagttgctccgcagtcacatattgagttgttaagtactatcgatggagaagtactcggcggtcgtaaagaattattagctacaacggttagccgccaagaagttacgatttccggaaaaatctacaatctgaataccaaaactccggaaagcacaaccgtaaccatggcgaatcctgctgttctgttacagaaaaatagtagcactactcaagttgcgagaaaaaccgattatcttggcatcaaaagtgctttagagaaggagttttttaacgatttttcaaactccggttttaacgacaacgttcgcgttcaaatcgcttacaacattctggatatacggaaaatcttggcaacaaccatcaataatatagttagcatgttttacaatcttgatagaaccacaggtgacattgcagatgagacgaagaaaagcacaaataccgacattatcggcatgattaaaacatatctcaaatatgaccaggcaaaaaactcaaatgacccatctattaaaaaaacctttaacaaagcagaagagctgctgattaacacaaaagcgtatcacacctattttgaccgattattcacgacccctactcgtcaggcttttaaagccggtaaacttaaagatacaaacgataaaaaatcaaaccttccatgtgaattctctaaacttagcgaaaaggaccaagaggaattcaaaaatgaagcgattacgcataattatgacgttctgcgattactcggcttgggtcgtcagcttgtggtgcatgaaaaatacaagtctgacgaacacaataaagataattcgatcgagtccctgttcaacattgacaagattataagaaacagcaatgataccatggaccttctgaaacggctggataatatctacctggaatcggccgaacagattgataacagctttaagaaaagctcagcgacaaattgcttaatactcgaagagctttacaaacgcattggaaaagcaaaaacacaggctgaactgtacaaggattattatcgttatgccattttaaaagaagaccagtgcctgggaatctcgtttaatcgtattaaagaagcggtattggagaagctcaaagaagaacagcgctataagaatttcgagtatcggaatgataacaaacggttctacaccttgtgtaacttcgtactgtggcattatatggtcgatcttcgggacagaaatgagacccgcgcaggacatcagcaaacggatagaaatgaaatagaggagctgaagtctaaacttcgcgcgtgttgcgataataacggcgatggcggtgaaaaccagaaatatgccatctacaaagaattcgttaattttcactggacggacttgcgtactagtatcaatacgttgtatgatctgtgcgtcaaatataagtatactgcaaaaaattatcgtatagactccaagattcagatcgacaatcagttatctagctcagcaaacaatgtcaagacctttgtcaagtacatctattttttatccgaatttctcgacgggaaggaagtgaacgttttcttcaacgaattggtggagaaattttcgaatattgcagaaattgtgaccacggtgaacgacaatattaataattcgtcaaagaagtcacccaatatctcttttctcccgcagtattcattgtttcaggaagctggtaccgtagcggatcagttacgtaatgctcgcaatattaaacatgcgactctgcgtgcccgcattaatgataaagttgcggataaagatagcaaaatgtctccgtcgaagcaaacaatatcagatgctctgtacatgctgattgacgagaacgataccattgaaaattataaacagctgatatgggacgagaaagaatctggcacctgggtgaagaaggctactggtaataataaggtgcgcaacttcatcatcaataacataattatgagcaaatggttcatgtacatctcgaaatattcagaccctcgcaactgtagcaaaattatgcataataaagaggcagtggtttttgctatgtcaagtattccggatgcccaaatcgagaaatattataaacgtgtgacggccaaaagtgtacagtatggcaacaaaaccgcggaagaaatgcgtagcattgtaatagatgcgttaatgaatttttccctcaagcccgttttaacgggagttgccaataatgattattccaatgaaaaccgggaacgtgatatcgggattattcaattgtatcttacggtcgcctacattgtgacaaaaagtctggtgaacgtcaacaaacgatttttactggcattctcttgtctggagcgggacgttccactgattttaaacgggaagagttttaaagatgccaacattttagttttgagcgaaaagtttatagcagaggatcaggagatagaacaaaaatataagctcgccaaaaaaaatcgaattacgcctaatatgtcaaaagaagacgtcaaaaatgtgtttaaagagttgaacgcagaatataagtctaaacattacgcagaatcattaacacgtccacgtgatcccgattccaaaaaagataaaagttgcgcgtaccttgtgaataacctgaacgaagccaagaaaattgagaacgtcctgatggattttaagaacaaagtcgatcacctgaatgtagtaaaaagtgcgccggaatatatgtcgaatatcaagaatatcgatagtttctatggcatcttctgtttcgcgctgcagaacatactggccgataaaatgataaagtggtctgtcaatgaaaaaaattctaaggaagatgtggagataatcaattcgtatgggcaggaacttaagaagaaacttgattcccgccatacttttgatagagatgcaatgtggataattaatatgccttttgcctataattttccacgatacaaaaacctgagctctgagtatctgttctacgacaaagaatacgagaaaactaaaaaataa

SEQ ID NO: 328 - DNA, 3375 bp, synthetic construct
  source 1..3375: mol_type = other DNA
atgaaaatacctcagattattgagaataacaaacatctgtttggggcgtactctacaatggcgttgtcaaatatccgtaatattctggatcatatagctacactggccgatatcgaaaatgacttctactcagactccgactcatattggtaccatccatgtattaaaattattgatccacgtaacaattgcacagacgcagctaaagccgacttcgtgattgaaaaaattaagagtcacttcccttttgtccctatcgtagcggaagcccaacgccaaagcgatatcttacgggctaaaaaacagctggatattgccgtgagaaatcgtgactatcagaagcaagaggaactgaaacacagacaaaaatcattactttccgttacgaatgcagatatctatcgtgttttaaacaacatgttatgggtcctcgcaaactacagaaaccaaaccgttcattatttgataagcgacattaagtttgaagatggctccgattttctgaactataatgagcaaccgttgtcgcgtatgcttaataattattttaccatcgccctgcgcgatactgcgaacaagtattcttattctcccgaagctttaagctttattcagtcttctcgctataagaccgagaatcgccggaaaatcctggacactgactttttccttagtatccagcacaacaatagtgatacaaatccaaaaaatctgcatctgtccggcgtcggtgttgctctcttgatctgtcttttcttagagaagaagtacgttaatgtgtttctgcagaaattgcccatctatggaccatataagaaacaatctatggaagctaacattattcgacagtcttttagcatccataccgtgaaacttccgaaagaacgaattgtttcggagaaatcagattttaccattgctttggatatgctgaacgaactgaaacggtgcccgaaacagctgttttcgacgctgtcgtatgcagatcagaatgcctttcgcattgtgtcctcagatatgtctgatgtgttacaggtgcgccatactgatcgcttcgcccagttatctctggaatatattgaccgacgggagctgttcagcgatatccgttttcaccttaatatgggtaaacttcgatatcttaaaacagcggataaacattgcattgatggtgttagccgggtgcgcgttctcgaaggtaaaatcaacgcgtttggtcggatacatgaatttgaagcccgtcgaaaagaacagggattcgttgaatggcatgaacaggcagcgcgactgatcaagactaacaaaaatatcgagatcagagactttgagcatgtaaagcgagacgacgcaactccggacagctatccatacatcattgacacgtacacccattatttgttggagaacaacaagatagagatgcgttttggcgattacttgccaaaacttgttaaagtggacgatcagaaatggacggtctataacgaaatgccgacgtgctgtatgtcggccttagagcttccggcgatgatgtttcacatgatgttatgtgggtccgaggctacagaacatctgataaaggccgaagtagagaaatataagaaactcttcggtgcaatggcaaatggtacactgagtaaagagaacataggtaattttgagattgcgatggaagatcttccgaaaaaagttattgattgcgttaaccgcaagaaatccggaaaaagttttgtcaaacagattaaaaaggagattgctgagatgctggccgatactaatttgcgtattgtacgtctgaaaagtgacaaacgtagcgttgcttcgacccaaaataaaatggggaaacgcgggttcagaagcattcagcctggcaaacttgcggactggttggcggcagatatagtcaaacatcagccaagtttattctcaggcgatgattatggcaccgatcgcattacagggatgaactatcgggtgatgcagtcaactattgccacgtttaatgcggcaacacccgaacattcgctggatgaactcaaacgcgttttcagcgccgcacaattaatacagtgtcaggaacgggaacatccatttttacagaaggcactgaaccgtaacccgcagaatacaatcgatttctatgaattttatctccaggcgaaacgtgcctactaccaatcactccgccaatccatagagaatggggaagatgtaaaactgccgtatcttaatccggatagaaataagtgggtccgccgtggcgcctcattttattctaccatgggtgatatctatctggaagacatgccgatagagttaccccgtcaaatgttcgacaaagaaattaaaaaagcgctggcgcaactcccttcaatgaagggcgtggacatgaaacagtctaatgtcaccttcttaatcgcagagtatcttaaacgcgaactcaaggatgattttcagcctttctaccagtggaatcgcaattatcggttcacggatatgatgatttgtgaagagaattgtgatactaaagcattggcaagcaagtttattccgctcgaactgcgtgaggagatttgggaaaaacgcggtgagcttaaagacgcatataaacgttgggcttttggaagactgaacaaaaatcctgacatcaaacgtttatcaccggcggaaaaagatgaactgctggaaaagagaatagcgaagtgcagaaatgaataccagaaaagtgaaaaaatcattagacggtacaaagtgcaagacgtattgatgttcatgatggtaaaaagtatgtttgcacaaggagtctttactgcggaatctaaagagtttgctctgtccactatcaccccggatgccgaacgtggcattttaagcgaagtagttcccattgatttcaagtttagtatcgacggtaagacgtatacgattcacagcaatggcatgaagataaaaaactacggagatttttacaagctgatcaacgataagcgcatgaagtcgctcctgaacatcgtaacacactctaccattgaaaaagacctgttggagaaagaattttccacctatgatgataaaagaccagaagccgtggaaataatatttgaattcgaaaaagcagcctacgaaaaacacccggaactgaaggaactgttaacacctgaacgtaagtttgattttcgtgccctgttagaagagttacaggctaaaagtgatcttagccaaattgatgctcggtatttgtcacagattcgcaatgcattcaaccacaatgcttatcctcggaatctgaaaataacgagtaatatacctgagatagctcaggaaatggtgaacatttttcgtattaccgatccctacaaaaaaggtaaaaaataa

SEQ ID NO: 329 - DNA, 3342 bp, synthetic construct
  source 1..3342: mol_type = other DNA
atggaatctttaattcagcaagaagagaataaagctagaaatctgatcgatgatccacagtatttcgggggctatctgaacatggctcgacataacatattctcaatcaacaatcacctggcgagctatttcggaacctctggtttgtcaaatgaagaacaaattccggatagcttcttgctgtcagcagataaacggcggaatcaagaaactaaagaactgattaaagaaaacctgttgtttgaaagaacgctgcgctttatgccgatttttagaatttttgatacagaaagactgccaaaagaagttcgtctgaacaccgaaaatatggagaaagattttgatgagatgcgaaagtgcttaaaacaggtctttagcgaattgaacatttttcgaaatgactacacacactatttttccaccaacaccgagacaactcgcaaactgcaagtgacgcccgaactggaagaatttttgtctcgcagttttaagttggcgattgcctttactaaacagcgtatgcgtgacgttttaaaggaagaggattatagcttagtcgaaaaaaaagtcatggtcttgcccgaggaacgcgttattaccactgaaggcattgtctttcttgcgtgcatgtttctggaacgtgagtatgcgtttcagttcatagggaaagttgtgggtttaaaaggtacgcatcgaaatgaattcattgcaacccgagaagttctcatggcttattgtgtgaaactgcctcatgacaagtttataagcgaagatagtaaacaggccctgatattagacatcgcgaatgagcttaacaagtgtcccttgacattatatgacgtgattactgaggatggtcgcaaacaattcagacctgaattaacggacgatgccaagaaaagtgtgattgaaaattgtatcaatgaggacctcgaggtcgattacgatgaatacatacaaattctgaccaaaaaggtacgctataagaatcgcttcccatattttgccttccaatacatagaggaaacgaaacttctggataactttcgcttttccattgaccttggccagtttgttctggccgaatatgaaaaacggatggcgggtgaaccaacctctcgtattgtcgtagaaaatgtaaaagctttcaagtatctgaaagaagtgacagatgaagatgtagttctgggactcatgaaatcgaatccgcctagcaatcgttttctgcagttttcacctcactacaattccgataataataaaattggtattagttctaaaccacagacaagcgtagtgaaaagtaaagggaaaatagacagcaaaatcgagtacaagattaaacagccgttaccgcgcgcatttgtgtctatacatgaattaccgaaaatcatcttgttagattacctctccaaagggtctgttgtcaagatcattaactctttcatccgtaccaataaaagtattattctggatgtagacaagatcaaggagatcaaagaaaagctcccgaataacgaggtatggtttccttttcggcggatgaccgattccaaaaaacactcagcctactcggagaaacagaaagcggaaattttgcgcagaaaaaaattgctgaacgaaattctgagttcctactcgcttaacatcaagcagattcccagtagaattatcgattattggctgaacattattgatgtgcgcaaagaacgttcgttttctgatcgtatcaaactgatgaaacgggattgtgccgatcggtataaagccgtgaaacgaaatgaaaaagataaaacagtggcgatccctaaaatcggagaaatggcaacgtttttggcaaaagatatcgtagctatgatcgtagacgaagacaagaaatctaagataacgtctttctactacgacaaaatgcaggagtgcttagcactgtatgcgaatatagaaaagaaaaacctttttattcacctggttacaaatgaactcaagctgaacgaaaagggcggacatccctttttaaaacgtattaaccttaacagtataaccagaacgaaagagctctatgaaatctatcttagcgagaaggcatacaaacttaattccaaggaaaatgatgaaagctggatgagtatgactttttaccatcttgaatggaatgaaaaagcaaagaagaagatgaccaaggttgtctatcccgtgaatgacgaacagatcccatatactattaaacagtggaacaaaccgcaacagcctctgtttgaccgctttacgaatgaacaaggaaaaagttcagactgggttcgcctgaaaccgctggatcttccgactaatcttttcgatgaggagatttgtgttcagctgcggtcccggcttcaagaggcaaagataccgttcgacaacatctcaaattactcagaattattaaaactttggtggaaatcccgcgatgatagcactcagcctttttatctcctcgagcgccagtacaacatctatgacgagtcagtccgttttacattgaactcgaaaaataagttcaaagactattatcaggccgcgctgaaaaaagtattcaatcagaaaaaagctgaacgtgaagccaaacgtcgttttaataaacggctgccagatattcagttcaaagatgttgaacgtgttttcaaacatgcaatagcagaaactgagaagcaaattagaattatacaagaagaggatcgcatcatgttactgatgctcgagaaactcatggacgatcaacagctgaaactgggcaaagctgagacactcttatcttcaaccgtaccggttaaacagaagattggtgataaaacaaattcgtcacgtgtgatcgttgctcaacgtaaacaaaaacattatacggtgttacgtaagtatcagtatgatcgtcgcctgccagagttattcaaatataccaccgagaaagaagagttgaagcttgagtggctggaagacgagcttaaggcctacaacaaaggcaagctcaaagttttcgatcttgtgtttagcttagaaaaacgtatcatagaggttgcgaaacaggacattatagcattgttggataaaagtggttctaacgattccaagtttaatgtggatcacaaaccgtatatcaaatggctggaaaatatggaactgattaacagcaaagaagccggctttatgaaaaagattcgtaactcattttcgcataatcagttccctgaatgccagactgtcgagctgatgatttcgctgaaatcagacatcccgatagctacacagattgtgaatgagtatgagcgtttaatattacgtattagcagtcaaatagaaaagatgaaataa

SEQ ID NO: 330 - DNA, 3402 bp, synthetic construct
  source 1..3402: mol_type = other DNA
atggagaaagaattgattgtgaatgagaaccgtgaacgtacattaaaagatgatcctcaatatttcgggggctatcttaatatggcacgtctcaacatctttaatatctcaaaccacatagctaagagattcggtttcacgatcttaccaaacgaggagagaatcagctcttcgtttctgtgtaataaggcactgaaaaacgcggattggaatcatattcatagtagaacaaagcgctttcttccaatcataaaagtttttgatgcggagagcttgccaaagactgaatatgattttctgatgtgggaaggaaagaacttcgccttaatgaccgataccttaaaatcagtattttcggagattcaggaatttcgcaatgattactctcacttctactctaccgaaaaagggacgataagaaaaaccaaaatctctcctcaattggcttcatttttagaagtgaatttcaaacgggccattgagtattctaaaatccgcctcaaagacgttttacgagaggaagattttaaccttgtagaacgattaaaggtgtgcaataacggtagcgaaataactaccgagggactggttttcctgatatgcatgtttctcgagcgtgaacacgcttttcaattcataggaaaagtgaaaggtttaaaaggcacgcaatatccttcctttatagcaactcgtgaaacgctgatgagcttttgtgtcaaacttccccatgataagtttgtctccgaagatcctaagcagtccctgattttagacatagtgaacgagttaaacagatgtccaaaaaccttatatgaaattattagcgaagaagatcggaaacagttccgtccggagctcgatataaagagtgtagacaatctcttaaaaaactctggtaaggaagagctgctggatacgatggagtttgaagaatatatggaatcattgaccaaacgagtccgtcattcaaaccgctttccgtattttgcattacgcttcattgaagagatgaaactcctgaacaatatgcagctccatatccatcttggaaagtttgaactgcagaagtatgacaaacagttgaacaatgaaccttttgaacgtgctattattgaggatgccaaagcattcggttatttgaaagacttcaatgatgaaaatgacattaagggcgaaattgtaagcggaaaagattctgagggtttcgcacaattttctccgagctactttctgaaatacaacaagatcgggattcgttataagcgtgacataccccatctgatagttgacaaaaataacagcaagggtgcatacaatttgaaacaacctctggcgaaggcctttcttagtgcctatgagctgccaaaaattattctcatggagtatcttcaaaaaggccgcgctggcgaacttattgatgattttatccagcttaacgacaataaaattatgacgtgggatttcatagagaatatcaaaagtcagttgccggattggaaaactttcaataagaagtcgtttggactgaaagacaaaaaagggtatcagacagaagaactgaaagagctgaacacccgtaaaaatcagctgaacaaactcttagcgccagagggattaaaccataatcgtattcccgaacggattacagattattggttgaacataggcgacgtgaaaaaaaagcgctcgttttctgatcacattaaacttatgaaacgggaaggtatggagcgcctgaaacagctggaaaagttcaaaaaagaaggtaagggtaaaataccaaaagtaggcgaaatggccacgttcctggcaagcgatattgtcaatatggtgattaatgaggaacggaaaaacaaaataacgagtttttactacgataaaatgcaacagtgcctcgcgttatacgccgattcagaaaaaaaggccttgttcattcagatcataaaggaactgaagttaaacgaagaaggcggccacccgttcctgaagaagattgacctgcagaaaatcagtaaaacgtcccagttgtatgaactgtaccttacggaaaaagttaataaacctattcgtgaggaagtttttaagtatgatcgtaaaaagggctataaggtcaccaaaatcatcttacgagataaaagttggatgggggaaatgttttacactactgaaaaatccgaaaagactggcaaagatattaccatcgtccgtatgccggaaaataaaacagaaattccgtttacaatccgccgttgggaagagaaacagaaaacagatctgaaagtttggtttcataatgtgaccaagggtaaagacaaaactaaagacggtcccaaagcgatttcgttaccgacggatatttttgatgacgagatttgcaccctgattaagattcagttggacaaaatcaatgtcaagtacaaagagaatcttaagtataatgagttgctgaaattgtggtggtggaaatctcgggaagacgacgttcaaaatttctatcatagcaaacgcctgtacaaggtttacgatgaagagattaatttcaccccggatacaaaaagtacatttgtggaatattacgaaaaagcactgaactccgctttcgaaaaactgtcaaaagcgcgtaaaaaagaacgcaaaacgcaccgtgccttgcccgatatcaataaaaaggaagtagagaaagtgtttaaacgggcgataggggagacagagaaagatatccgcatcctgcaggaagaagatagaatttccattttaatgctggagatgttgatggataatgccaccctcaaactgaaaaatatcagctacttgcttaacgacactaccagaattcagcaatcgattaccgcgcatctgtcatttgatgaaaatggcgaaagtattaaagaagggactaaaccgacgattaccaaaacaattatcgccgatcggaaacaaaaaaactatactgttctgcggaagtttatatttgaccgaagaatgcctgagctgtttgaatattatgcttcaaatgaagtagctttagattgggttacagacgaactgcgcgcttataataccgcgaaacagtatgtatttgacaatgttttcaatcttgagcaaaaacttatcgagaaagatgaaacagggatcaaagcaatgtatactaataaggaaggtaccccgataaccggaaatattcagtataaaccgtacgtgcgctggctcgaaaataaaggtctgatcaacaaaaaccaaaaacgctttctgacaatgacgcgaaattgttttgcgcacaaccagtttccgcagaaaaagactgttttacgtattgtgccaaaccttacagataataacatcgccctgcagattgcagatgcatataagaatatcacagacgaaatccttactaaactgtaa

SEQ ID NO: 331 - DNA, 3372 bp, synthetic construct
  source 1..3372: mol_type = other DNA
atggatgcagaaggaaaaaatgaacgcactctccaggacgatccacaatatttcggcggttatctgaatatggcgcgtcttaacatttttaatatcagcaatcatgtcgccgataaacttagcatcgcattgctgaagaatgaagaggatatcaacaactccttcctgtgtaactctaatcagaaactcaactggtcaaaagcttatgcgatgactatgcgctttatgccgctgctcaaagtttttgataccgaacgcttacctgaacatcgtaccagccaaaaagataaagaaaaaggtaaagagtttggaattatgtgtgattcactccgcatagtgtttcgtgagctgaaccagtttcggaacgattattctcactatacaagcactgaagacaattttacacgcaaaattgagatatccccggaattagccgagtttctgacatgtaactttaagcgtgcaattgaatacacaaaacagcgatttgcggacacctatcagaatgaagattttattttagctgagcggatgcaaatggtgaaaagcaatattattacgactgaggggattgtgtttctgacatcactctttctggagcgggaacatgcgtttctgttcatcggtaaagtaaaaggtttaaaagggacacagtataaacagttcaaagctactcgagaggtgtttatgtcttattgtgtcaacttgccgcaagataaacttatatcagatgattacactcaatcacttaccatggacatcattaatgaattgacgaagtgcccagagactttatacaatgtgttggatgaatccgcccgtaaacaattcataccgcagctgggcgaagtcgaaacggataatgtgcgccagaattccattaatgaagctgaactcacggatgagaatgattatgcacagtatatggaagacattaccaaaagagtacggcactcgaatagatttccgtatttcgcattacgttttattgatgaactcgatttgctgggcaagttcaagtttcagttggaccttggcaaactgaaactgaacacgtatcccaaaccatatatgggggaagatgtagatcgtgctatcacagaaaacgtttctgcgtttgggaaactgagcgatcaccaggttaaagaagaagtacaggcgaaggttgtgaaagattattcttctgtacaatttgatcaattcgctccgcattataatatggaatgcaacaaaattggaattagtcgtaaaagtgagacagcgattgttattaaaccctctgaaaccggtgtgaaaagtgcctataaactgaaacagccgattcctgaagcgttcttgagtatcaaagaattaagtaagatagtgctgttagaatacctgagtcccggtgaatcacaacgcttcattaccgactttatttgtacgaatagcgataagctgatgaatctggatttcatcaaagaagtaaaaggcaaactgcctgtcttcgacaaacctttttacaaaaaggttacgatcaaacgtaaaagttacacaaaacacgaactgactgatcttgaggcccgtaaaaaccttttggatcaggttttagttacctatgggttaaacacgaaacagattccaacccgcattacagagtattggttaaacattcgtgatgtgcgcaatcagtatattatttcagaacgtataaagagtatgcgaaaggattgcacgaccagattgaaaagcctgaaaaaattggatgagaccggtaagggtaaagttccaaaaatcggcgaaatggcatcatttttagcaagagacattgtttcactggttattgacccggtcaaaaaaaagaagatcacctctttttattacgacaaacttcaggcctcgttagccttgtttgctgatcccgacaagaaaaaggagttcatgcacctcgttaaagatgaattaaacctgctttcggtcgggggacatccctttcttatcaatatcgactttaccacgatacactacacaagagatctttataagaaatatttggaagagaaaggttgcaaaatcacgaatgatcggaaagatataagttggatattcaacactttctacaagaaagaaccgggtaaaaattcctcactgcctgttaccaaagttaaacttccgctggataaaaatggtaaccctgactccaaacggctgccgcattctctttattcgctgggcaaccgtaaaacagataactccattgaagaaatagaaaagtggttgtccaatgttaaacatggaaagatgaaaactgattgtaccaaaccagtagacctgcctacgaatcttttcgattctagattaattgagttactgcagaaagagaccggcgacaccagcctggcaccaaaactgaatggattatttgttacgtggtggaagaaacgtggggactcaacacaatcgttttacaacgataaacgcaactacgtaatctatgaccaagaggtgtgctttcttccaaataccaagaaactgtaccaagattattatcagagcgcccttgatcgcgcttttcgtttaaaaagagaagaacgtcggcaggagagattactcaatattcgcttaccggatatacagcttaaggatatgaaaaagatcttcaatataacgctgagcgaaactgaaaaggaaatcagaattttacaggaagaggatcgtctgctgttgctcatcctggagaagttaatggagaaggaaatagcaggcacactcaacttgaagaatgtcaatgatctgttaaacgaacaggtggatatctgccagcaggtcaaaacttatcttagtttcaaagaaaacggtgaactggcatcgaaggacgaacgcatgcaaataactaaaaatataatatcctacggttctcgtaaaaactacggcctgctgcgacgatatgtccatgaccgtcgcatgcctgagttatttgaatattatcctaccgacgatatcccgtttgaggcgattaaacaggaattagaggcctacaataaggccaaacaaatcgtatttgataaagtctttgaactggaacgggcgctgactgagcgattcaaagacgaagttatggcacattttgtgaaccgggacggcggaagccgcttgaaaggtaatattcagcatagtccgtatctgaatttgctcgagtcgaaaggcattatcagtaaagacgcacatcgttttctgaaggctgtacgcaatgcgttctcacataatcaatacccccacaagaaaacaatggagatttttgtgaaggaatggaatacaagcaacttcgccaatcagattgtggacatctacaagcaaaagatcgacgaggtgattgacaatattaagaaataa

SEQ ID NO: 332 - DNA, 3003 bp, synthetic construct
  source 1..3003: mol_type = other DNA
atggaagaagctaatcgttatatctatggtgcatactttaatatggcgcgtgataatttcttaaacaccatcaaacttttagctgataaaatgaaactcggggccacatctgggttcggcaaagacgggaatgaggttaatgatatcaacgaactgttcggtgataaaaatacttatgcgaacattgaaaacgtcgtcgaattttattttccgtggatcaaagcactcgagggacgattcagtctggataaaggtgatagaaatctcaacgatatgaaaatgttctacaaatccgttctgacggcattttttaccgcggttgactcattgcgtaataagtacacacattatagtcacaaagaccttaacatcagagagattaagatagagtgtacgttaggcggtaaggattattgtattggactgctcaacgctctggactgcatctacgatagtgccgtcaatcttttaaaactgcgctttatggcagatgaagatgaagtcgcccatcttcgtcgctgcaaagcggttaataaaaaagtggtagttcggacagagaaagatggtttttattatcgtctgtctgataatggcgaagtcacagaaaaaggtgtcatttttattgcatccatgtttctgaaccgaaagtacgggttcttgtttctcaagcaactggaaggcttcaaaagatcagacgaaaagagatatcggttaaccttagaagcatttttggcctttagcaatattaaaccagttgatcgcctgaaatcagacaaactggaccgggcgagcctgggtttagatatgttaaacgaactgaccaaaattcccaaagaactgtccgagacattatcagtagactgcttatacaagtatcttgcttcagatggggaagatgatctgcgtagccgtattcgctatcaagatagatttgttcccttagcattggagttcatatcgcaatccgacgaattcaaggatttccgtttctacacgtacgttggcaattatgtttataaaggctacattaagcgtctgatcgatggtactgataaagagcgttacctttcagatcgactgtgtggtttttacaaatcggtgaatgatgcaagctctgacgcaattgcccagaaatatggcgtggaaattaaagatagtaacgaaccggactacatgttaccggatagctttcggcctcatgtattacgtgctacgccgcatttcgtcattaacaacaacaatattggcatcaagatatgcggcaacgactgcctgccagtcgtcaatggaaaaggtgtagaatctcctgaacctgattattggctgtcgatctatgagttaccagccatgttattttacgcttatctgcgggagaaaaacggtaaactgctcaaagactataagtcaattcgtgagttaatcgaggatgtggaaaaaaaagcggacgaaaaaaatgatcgtgataaaggtgcactgatggcgcgtcatattgataaagagatcatttggactcagactaaacttgatgaagttaaacgcttagaagaaaaaaaagtggcggcctatggaaaaaaaggtcgcgttgtgttaaaaagtgggcgcatggccgatctgttggcccatgatatggttcggttgcagcctgccaccaaaggaagtgataaaataactggcgctaattttcaagcactccaggtgtccctggcgtattttaaacgagatatactggccgatgttttttctcgcgctatgttgaccacaggcaatcatcgccatccctttctttatcgtatcgatgtgtcgcactgtagctctcttagagatttttatgtggcgtatctgggtgagagacgtaagtattttgaggacgtcgccaagaaaattaccaaaaacaaactgaacaccccgtgccatatcttgcggcgcttgcagcgagaaggttcaggcgaggaagccgggaaagacgttaaaccgaagtttctgccacgcggcatctttacgggatccataaagagttgtcttgagaaatcggctctgaacattaatatacgtaatgcacggaatgatgttaaacctgcgattaatgcggcttatctcatattcatgtattacaaagagatcgaaaagggtgagtttcagggtttctatggcgagaaaagacgctatgatatactggaagaagggaaaccgttggatcttgatgaacggaaaaaagcactggcatctatcaaacccgctaaaatcgatgtgagcgaggctaatatgccgatgagcaaagaagaacacctgatgcgcaaacgttaccacgctgtatgcaataatgaaagcgcaatccgcatgtatcaggtacaggatatactgttgttactcatggcgaaggatatcttcaagaaggcgctgtcagaggtggtgatgtctaagaaaattggactggaaaatcttaatggcattttcgacgcgccagttaacttcgttaaaaactttgacaacattaaactgactgcaactggcattaaaattaaagattatggaaaggtatgccgtctcggaacagactttaagttcaatagcctgataaaggccttccataaagtatacagtaagagtgtcgaaatggactattctgactatctcaaagaagaagaagaatttgaaaaataccgtttgaacatggtgaaactttgtcgcgaggtggaacggggtattacggaagatttgcacctgtctctggatggaaagagtcatctttcattcaatgacgacgtgattaagtcgtataatgacaagtacaatgtgtttaacggggacgaccttacgttttttattaatgcccggaatatgtttatgcacggcgactataagtatgagtgtgttaagtatgtagtatccgagcattttaagggatccttaaacgatgtaagctttgccaaagaaacatacggtcacttttgtaatcttttggaaagcatgcgcaaaaaaaccgggttgcgaatagatatttaa

SEQ ID NO: 333 - DNA, 2781 bp, synthetic construct
  source 1..2781: mol_type = other DNA
atgactgagaccaaaagtaaacgtgaagatattgcaaaaccgcctgccgcaaaaagtcgctccaaagctgctggcttaaaatccactttcgctgtcaatggatccgtgctcttgacttctttcgggcgaggaaatgatgcggtaccagaaaaattaattaccgaaaaagcagttagcgagttgaacacagtcaaaccacgcttttcagtggaaaaacctgcaaccagctattcaagtagttttggcataaaaagtcatatatccgcaaccgcggataatcccttagccggtcgggcgccagtgggcgaagatgcgatacgtgcaaaagaagtgctggagcaaagagtatttggcaaaacttttcctgatgataatatccacattcagctgatctacaacatcctcgatatccggaaaatcctgtccacttacgccaataatgttgtgttcacgataaacagcatgcgtcgtttagatgaatatgatagagaacaggattatcttggctatctttatacgggtaactcgtatgaacgccttctggatattgctgacaaatatgcagtagacggcgaggattggcgtaacacggcggccgggataagtaacgactttgaaaaaaaacagttccagacgattaatggtttctgggatcttctggacatgatagaaccatacatctgttatttttcagaggctttcttctgtgaaacaacagttaagaatccagattctggtcgcatcgtgccgtgcctggaacagcgaagcgatggtgatatctacaatatcctgcgcattctctcaattgtgcgccaaacttgcatgcatgataatgctagcatgcggaccgtcatgtttaccttaggtcaaaattctgtacgggacagaaaaaatggatttgacgaattagcagaattactggactacctgtatgatgagaagatcgacatcgttaatcgcgactttctccgcaatcaaaagaataatattgaattgctcagccgtatctatggctcttcggcggatagtccggaacgggaccgactggtacagaacttctacgactttcgagtgctgtcgcaggataagaatctgggtttttctattaaaaagttacgtgagaagttgttggatagccctgcattatcggtagtacgttctaaaaaatacgacacaatgagatcaaagatctattccttaattgactttatgatctacagaaagttctcggaaaatcacgtcgcggtcgatgatttcgttgaagaattgcgtagtctgctgacagaagatgagaaagaatctgcctattctagatgggcggaaaccctgattaatgatgggtttgcgcaggagattttggtcaaactgctgccacaaacagacccggcagtaattggaaaaattaagggaaaaaaactgctgaacgactcaatcgcaggaattaagctcaaaaaggacgcgagtttctttacgaaaattattaatgtactctgtatgttccaggatgggaaagaaatcaacgagttagtgagcagtctcgtgaacaagtttgccaatatccaatcatttgtggacgttatgcgctcgcagggcattgattgtgggtttaccgctgactatgccatgtttgcagaaagcggccgcatatcccgcgaattacatatacttaaaggcatagcccgcatgcagcattcaatagctggcttaggggatgttaaaatatattcctctgatgataagtttcatggtgtgtcgcgtcgagtctataccgatgccgcatacatactgggctttggtgaacgttcagaagataatgatggttatgtagacgattatgttagcagcaaactgctgggcggtgcggataaaaatttgcggaattttatcacgaacaacgttattaaaaaccgacgtttcctttacacggtgcggtatatgaatcccaaacgggcaaaaaaactggtccaaaacgacgccctggttgtcctcgcgttgagcggcattccggagacacaaatagatcgctattataagtcctgtattgagaaacgcagctttaatccggatcttaacgagaaaattgcggcactgagtgagatgattacgactttaaagattgacgattttgaggatgtgaaacagaacccggagaagaacgcaaattatgaggcgaaaaaaaatcagagaatttctaaggaacgttacaaagcttgcatcggtttgtacctgaccgttctttatcttatctgcaaaaaccttgttaagatcaacgctcggtatagcatagctattgggtgcttagagcgtgatactcagttgcatggtgttgactttaaaggggcggcgtacatgacacgtgatgtcttcattgccaaaggatggatcaatccgaagaaacccacagttaagtcaatcaaagaacagtatgccttcttaacaccgtatatttttaccacgtatagaaacatgattgcccaccttgccgccgtgaccaatgcttataagtatattccccaaatggaccggtttaaaagttggtttcacctgtatcacactgttattcagcattctctgattcagcagtatgaatacgaccgtgattatggacgtaaaggggctccggttgtgtcagaacgcgttttacaattgctggaacagtgtcgagaacattcgaattactctcgcgatctgctgcatatactgaacttaccttttggttataaccttcctcgttacctgaacctttcatccgagaaatacttcgatgccaatgcaatttaa

SEQ ID NO: 334 - DNA, 3285 bp, synthetic construct
  source 1..3285: mol_type = other DNA
atgaacattcctacgatcatagagcagaaaaaacaattttttggcacctactctgttatggcgctgctgaacgtccagacagtgctggatcacattcagaaacttgcagacatagaggacataccgtgctatgacgagaatgggaaagagaaagataagcgcgagaacctttgggagcatagtgtaatgctgtacatcaattataagaacaattccatccagaaggctcccgaaaagaccgcgttaatcattgataaactgatggcatattttccgtttctcaaaatcatggcggagaatcagcgtacacataaaaacaagaaatatcagcagaatcgcctcgaggtgaacagcgatgatgtgttcgatgtactcaactgcttatttcgggtggtgaaaaaatatcgtgataccaccacgcattacatgctgcacgacgaatgttgggatgataatagcaagtttctccgttgttcggaacagattttagcgacgatgttgaacaaatactacgacgttgccttacgtaatatgaaagaacgctatgggtatacaactgaagagctggccttcatccagaatcatcgctataagatagaatgggaaccagattcacggaaacgtccacagtccaatacgcggtttttcttttccctcgttgacaataacggcgatgcaaatcccgacacgctgcatctttcaggtgtgggagttgccgtcctcatttgtcttctgctggacaaacagtacattaatctgttcgcacagcagttaccggcgatccagaaatttgaacctcagtcggccgcccggaaaatgctggttcggagcatgggtattcactccattgtcctgccaaaggaccgtattcattcacaaaaagataatatgtcgattgccatggatatgataaacgaaatgaaaagatgcccgaaagaactctttgacacgttgtctccatcagatcagtcccggtttcgagtaacatcaagcgatcataatgaggtactgttcctcagacacaatgatcgctttgctcagttggcattgcaatacatagactattgcaagtggtttaacgggattcgtttccatgtcaatatgggtaagctgcgttatctgtttaatgctgaaaagaattgcatagacgggattaatagagtcagagttatagaacatgccttaaacggcttcggacgtattgatgagatggaagacctgcgaaaaagtgaagtaggtacttttgcaaatactggtgttgcaatacgagattttgaaaatgttaaacgcgacgatgctgatcctaataactatccgtacatcgtagatacctatacgcattatatcctggagaacaacaagatagagatgcttttaaccgatacgaacagtctccccacaattaccgagaaaggcggtaagtggtatgtgggaaaaaaggcgccgacatgtcgaatgagcatttttgaattaccggccatgatgtttcacgcaatcttattgggtaaccaagcaacagaaaaacgcattaaaactgtttgtgccaattactcgcgcttattcgaggcattgaaacagggtgcggttaataaagacaatatcgccagctttggtatcgcggaagaagatattccgcaaaaagttttagatatcgtgaacggttgcgctcaaggaaaggacgtcaatatcttcattaaaaaaaatatcgacgaaatgctgcacgatacagaacgtcgcctggaacgtttacgtgaagatcgcgaagctgttaacgcaaatgataaccgtatgggtaaaagaggctttcgtcaaatacaacgtggcaaacttgcttcttttctggcagaagatatcgtcaaactccagccgaccctgtgtaatggaacagataaacttactggcttaaactatcgtgttctgcaagcatctctggccgtttatgattctggtggtatgaatgaggcacgccagcaattcaaagcgttatttgtcaaagcgcatctgctggggactgatcctcacacttgtcatcctttcctgcataaagtgtttgctcgctctatcccagataataccattgatttctatgaacggtatcttgcagaacgtgagagctatcttagcaccattcagaaaaaagtagccatgggtaaagcggtgaatgtgccgtttatcaatcgtgctcagtcaaagtggtctgctccaacgcaagaagctttaggaaatgcttatacagatgatatggccattgaactgccaagacaaatgttcgatgacgagattaaagcgcacttgaaaacactgccggaaatggcggacatagattttgataacgcaaacattacgtttctgattggcgagtaccagaaacgggtattgcatgataatgtccagcatttttactcttggcaacgaaactacagatatattgacatgttgaaatgtgaaaccgatcgaaagaactgtttatgtagtacgtacacctcagtagaagaacgtgaagcgttatggggccgtcgtaaagaatgcattgaaaaatatcgccaatggtttacgcgtaaaactagcaatgatcgcgggcgatccttaattagtgctgtggatattgaagagatattagataaacggctgagtaatgcgcggaacgaatatcagaagtgcgaaaagactattcgtcgcttcaaagtgcaggacaccttgcttttcatcttagccaagaaggccctgactaattttgctgattataatggagagcggttctgcttgaacgatataacccctgaaggtgataaagggattctttcacagttaatgcctatgatttttcgctttgaaaagaaaggcaaggtatacacaattaagagtgagtcgatgaaacccaaaaattatggggactttttcgtgatcgcgaacgacaatagaatatgtaacttactggacctgatcgaagataacatagtgtccaaagaggacattgataaagagctgcaaaaatatgatcagtgccgccccgaaatggccaaacttgtcctggatcttgaaaaatggacttactctaaaagtccgggcttgatgtataaagagaaagtgcagttcaaagatgttttggacgaactgtgcaagcacaccaatcttacagagcgccagaagttcgttttaggaaaagtcagaaatgcctttgaacataatgactatcctgagaaaggcattttagaaatcactacccttccacaaatcgcagctcgtatgaaggacctgtttgatgaatatgcagaggttgaataa

SEQ ID NO: 335 - DNA, 3477 bp, synthetic construct
  source 1..3477: mol_type = other DNA
atgaaagagaagattaaaaacaaaagtagcattatccgtattattatgtcgaattacgatgacaaaggcttaaaagaattcaaggtgctgtataacaagcagggtggtgttgacacattcacatgtaaaactgatattgtggatggaacaattattttcttagagatagaaaaacaccttcgtgactttggcgatgatttttcctgggatatttcatctgatggaaaaagtgtcgaaataaccaagctgataaacggcaaagaaacgcgtaagtataaagtttctatcaaaaattcttcgacgaaagataaaaagaacctggtcgaattagaagttgaagatctcaaagagtctgcaattgatcgtcgccgaaccaagagttctactaaacgggtattgttgagcaaagacgtcatggaacgttatgctgaaattgcctttagtaagaaagaacgctgggaagagatcgattcccagaaaatctataaagttaaacgcttcttagattatcgttcaaatatgctgatctacttccaattcattaacgatttcttgaccaaaggcataccagacgagctggacaaaaatggtgaaattaaacagctggaactctggaaactgattgacgacgatgaaacgatctcagataaaaatctgaatcaagtgtccaaaaacttgtatacatacatttcacaggaaattaaagattctcagacgcgggccgaaaataatcgggagaaaaataaagagaaggagcactttaaagagttttacgcttttaatgatattagcgaagaatcaattcgtgaggacgttaaaaaattcatctatctttatgcaaatttgcgccataacctgatgcattacaattactcgttttttgaaaacctttttgaaggtaaggacctggtaatagagaaaacgaaaagtttactgtcgagtaccttagatcttaatatcttcaaagagttatccaacatagtggaattaagagaggaaaataaaactaattatcttgatgacgaaaccaccattagagtgctgggcaaagagaaaaaagcaaaaacacttcacaaaatctatagtatactgtgttcacgcaagaacggattcaataagtttataaactcctttttttctactgatggtattgaggaagaattcttgaaatcggaaattaaaaaagactttctggaacgcttaaactgggtagagaaatccctgattgaaaaaatcaataatccgccaagcgatacgaaactgaaatataagaatgacaaaactattgagaacatgacgaaagaaaaagaggagaaactggaattaattagtcttttgaacccacaagtgtccgattacaaaaccgaaaatttcaccccgtattattgggacatacatcagtcccctagttataagaaattgtataatgatagaaaagtactggtttcggaattgagcaaacttattgcaattggaattaattcagacactaagaaacgtattacagatctcaatgccgaacttctgaagataaagatcaagatggaaaaaattaccaaactgaattcgaaaatacgattgcaatataaacttcagatggcctttggctttatctatgcgaattactcaaaagtgtacaaagaaaagcgagttctgaacattaacggatttgttcagaatttcgatccaaccaaacttaataaagaaaaagaattggagagtcgcttaatctatcttaaggctccgtataacatctttgaagacaataaaagccttgactttaacatgaaaattgtcgagaacatcccagtaagcgaaaaaagtatatttcggatcaaaccggaaaataatctcagcaagttttacatcctgagctacctgttactgcctgtcgagttacggggtgattttctgggctatgttaaacatcactattatgggattaagaatgtcgatttcgaagaaataccggatattaaagaagataaacccaatgaaaattcggattctttctttcataaccttcgtcttttcgagaaaaacagcaagaaatttgaactgataaaatatagactcgtcgaatttgggaatcttaaagatcatctgccacgtatctatgagaaatttgggataaaaccggatgtgttagagtacattgaaaatagcgggaataaggactcaaaactctttgatcggaacatactgttacccatcatgaagtactatcagcatatcttcaaacttctgaacgacatcgaagttcatgctttattacgcttttctgaaaaagactcaattagtttagatgagtctattaaagagtgcagtaaaggtaagtttctcaattttggtaagctgttatttttgagccgttatggcctcgaggcgaaaaaagataataagtttaaagatatttttaacagagagaatgggctgtcgattacgaaagatgatgcgaagacggagcgcaaaaaatactttgaaatcttcgagacgcggaataagatcgcacacctgaattacaaacaactgtttcacgaccttctgtttgattctaatattaatatcaacaaagagctcgaaggcattattcaggaaactaaaacaattgggttgaacgcccagactctgggatataactttctgaacgatttttacatgagaaaggaaatgttcatatcaaaccagaaaaagagctcaatgacattaatcaacaatcccttatccaaggataaagacacaaaggaaattggcctcttgaagctgtatggtttaagcaagagtcaaccgaaagatctgatcctggcgaaatataaagaattgatgaacctgattgagaaaacagaggacagcattttgaaaaagaaagatttccttcctgtaaaggaagtttcaattaccgtaaagaaatctacccccaataaaaagggtataatggtggagttacctgaaattttacaaattaaggacctgaacgaaatggatctcctggcttatgcgtcaaatattcgcggtaagcttcacaaagactcttccgatcttttcggtatctacaaaaaattgaccatcaaagagctgaagaaaaaactgataaaccttttcatcaaaggagaaaagcgctatctgaatcttgaattagtgaataaaaccgggtatatggccatctatgaatctaccggcctgtatccgaagagttacgaaattctcaaccatgaaatctcttttagcgagatttccatgaagaattggtacgaacatgattttaaacctatatttcagatagatggctcactgcctaataacactgactataagaatggtgttttcatctacacatccccgtatgaatttcgagacaaagaactcatgaaaaaacaacgtacagtgcataaacgtgatatagaaaagactttttacaatgagaacgatatggattatactgggatctataatcagaaaataaaagcactgtattaa

SEQ ID NO: 336 - DNA, 3210 bp, synthetic construct
  source 1..3210: mol_type = other DNA
atgttcaacgatagtcagggcaatcagattgagcaaaacgacaaaagttttctggaaatcttcttaaaccaggcacgtcttaacgcgcacattacactgtgtcacatttcagatcttctgggggaaaataccgttgatgaagattcgttagccattatgcctgtcttgcggtttctcgaatcggataaagacgcggtaaaaagtgaacgcactttcgagctggtggaaaaacactttccaatgctgaaagtcatctatggtagcggaccgaaaaaagaagaggttaccttcttgggccgtaccaaaaagtataaggaaatactgggctgcttcttaaaggcagtaaacggaaagcggaacgaatattgccatgcttatagcaaaagttccggggattacgatatcaaaacactgactcgccatcttgaaaactgctttgatgcctctgtgagaaaaattaaagagatccgctccttggaagaggaagaggttttccatcttcgtagaaaaacaagcgaaggtaaaggtaaagagaaaagagtggtagataatccaaatttccactatcatttcaagaacgaggaaggccaactgtccgaaaagggattagcctttttagtggctatgtttttagaaaaaaaagacgcttatttgtttctcaagcgtcagcatggctttcatcgtggagaatctccgggcgaaaaagccacccttgaatctttttgtgtcttccggatacgcttgccaaagcctgttatgacctctgatgtggacaagaatgggctggccctggacatgctgaacgatcttaaaaaatgccctaaagagttgttcgaattactggccgaagaaaaacagcaggagtttcgcgtgacagattctgaagatggggatgaggacggcaatgagatactgatgcgccgttattcagatcgattcccctattttgcactgcgttattgtgatgaaaacgaggtgtttaagaacattcgcttccacatagaccttgggcgttactactttaagttctacgaaaaagatacaattgacggaaataagtaccagcgcgctctggataaacgcctgaaaacatttggtcgtattaaagacgtcaaaaataaggttcggcaggaatggggtgatataatcaaagcgccagacgaaatttcggatgagcagaatgaaccgtataagaccaatagcactccgcattataatttggttgataaccagatcgggttcactatctccggtgactgtaagctgcctgatgttaaacaaccggaaggaaagatcttactccagaagccggatgcctggctgtctatctatgaactgccaggcatgctgttccacggcttaggctatggttttaaaaaaactgagagcctgatagaacagtacatcattcggcagcggaaaatctgtgaggaaatttttcgcacaggaacgattccagcgaatgcaggcgagtttttaccgaatgctatcaaggaaataggcacgggtaatgagacatcaaacgaatatgcgaaaaataaacttgatcgtaagctgtcagatacgcgccaacgtattagagcgattaaagcaaccaaaaatagaattgccgataaaagtaacaaaccgggtaagcgcaagttttttgatattcgtgctggcaaactggctgacttcctggcccgtgatattatggcattacaggagtttgatccagccaaagaaggtaaggataaactgacttctattaattttcaggtactccaagcgactttggcattttatggggccaaaaaaaacacgttagctggtatgtttaagagaataggcttactggaaggagataaccctcatccctttatgaaagaaattgaacctggcaaacataatagcattgtaggtttctatgaagcgtatctggatcggaaagaagcgtatttggaagaatgccgcaaaggagaaaacttggataactaccaattccttcgtccgtcccgtcagcgatatgcaaagggtaaaagagaccttaaaaccataacacgccaacttctggataaccccgtcaatattccgaatggtttctttcgagaagaaattcgtgaatttgtttgtgaacaggacgctggtctgaaaagtcggaaaatgaatactgcatatatggtaggcgctaattttgaaaaaacgtacgggggccagcaaccttttcagtactatcaacgtaattatccggtcgtactcaaagctcaagaatactgtaaaaagagagaaaatcgtggcattgcagaggtgttacgtagtattgcaggtgaaatgtcataccgagagatggaagcctttattaaaaaagaaatacccgataatggtcggtttgaacctgagaatcttaagagaaatctcttaaacggatgcaaagactttaaaaaaaacgaacgactcctgcgccgttacaaagtgcaggatatggtcgcctttgctatggtggaaaaaacattgaaggaacagctgtcatttgatggtaacgttgttaaactcgaggcaattacgccgacagaggaaagcctgttcaaaaaaccgatcttatgttcaactgatatcgcgattacgtttaacaccaaacccacgcactatgacaatggatatgttgggtttatccaggaaaaatatgccgggcattatgcatctgaaggcaacaaaatcatcttgaagtatcgcataatatcggagaataccaaacttaaagacatcgggaagtaccgtcgctacctttatgaccgtcggctgccgggtctcttaatttggaagtatgcgcctaacgcccagtcagacattgagatcaagtattccgagatcgaggaagagatcaaagcttatgaacaatatcgcctgcgaattgcagagcagctgtacgtattagagaccaaagtgatcgactgctacatttgcaaagatgagccaggagaggactacataagctttaatggtattatagatacgattaaagcggaacaagccggtagcgaggagaaatgcgataccttactcagtatacggaatgcagtttatcataatcaatttcccgcgtttatggatgcgatcgaaaaaacggaaggtgacaatattgcggggaaaatgctgtcgataactgaggactacgttaagtgtaccgtcgagcagatgaatgaaggagataaagaattcgttaatgtgtaa

SEQ ID NO: 337 - DNA, 2367 bp, synthetic construct
  source 1..2367: mol_type = other DNA
atgaacagtgtcgaattgaagaaagaagaagccgcgttttattttaaccaggcggagctgaacctgaaagcgatcgaagatgatatttttgacaaagggcgccggcgcacactgctggacaatccaagaatcctcgctgaggtagagaactttatttttaactttaaagatgttaccaagaatgcgaaaggcgagatcgattgcctgatttcgaaactccgggaattacgcaacttttattcgcactacgttcataacgacaatgtgaaagtactttcgaaaggtgaaaagccaattttggaaaaggattatcaatttgcaatagagcggaccgcttcagaagatgttaaactggaaatagttgataaacgcgacaaacttaccgatgccggggtgctgtttttattatgcatgttcctgaaaaagtctcaggcaaataaacttatcagcggcatctcaggttttaaacggaatgatccgaccggccagcccagaagaaatctttttacttacttcagtgttagagaaggttataaagtagttcctgacatgcaaaaacactacctgttattcacgctggtaaaccatcttagcaatcaggatgactacgtggagaatgttcaacaaccttatgatattagcgaaggtttgttttttcatcggatcgcctcgactttcttaaacataagtggcattctccgtaatatgaaattctattcttatcagtctagccgtctgaaagaacagagaggcgaaacaaaaagtgataaaggatattttgagtggattgaaccgtttcagggtaattcatattttagcgtggatggtcagaaaggtgtgattggggaagacgagctgaaagagctgtgttatgtcctcttagtaggcaagcaggatgtgaataaagtcgaaggccgtattactcagtttcttaaaaagttcaaaaatgccgactccgtcgagaaagtggaagatgacgaaatgttggaccgggaaaattttccggcttcatattttgcgaaaactcgtgttggctcaattaaagggaaaatcctgaaccgattgaaaaaggccatcgaatcaaaaaaaatcaccggggtggatgtaaaagcatataataagatgaaggaagtgatggcctttattaacaacagtttgcctgtcgatgaaaaattaaaaccgaaagattacaaacgttatcttggaatggtacggttttggggtcgcgaaaaaatcaatatcgagcgtgaatttcgtagcaaaggttggtcgaagtattttacgagtggattttggatggccaaaaatctggaagaagcttataaacttgcgcgacagaaaaacgctgaacttttcaataaactgaaaacggcagtggaaaaaatgaacgagcaggaattcgagaaataccaacaaatcaatgatgcaaaagatctggcttctttaaaaagattagcgcaagattttggtatgaaatgggaagaaaaagattggcaggagtactctggtcaaattaagaagcgtattactgatcgtcagaaattgacgataatgaaacagcgtgttaccgccggtttgaagaagaagcatgggattgaaaaccttaatctgcgtatcacaattgattcaaacaaaagtcgccgcgtggtcctgaaccgaattgcaattccccgcggtttcattaaaaaacacattttaggctggcagggatctgaaaaagtttcaaaaaaaattcgtgaagcgaagtgtaagatcttgttatccggaaagtatgaggagctgtcccgccagttcttcaaggccaaagactacgataagatgacccagattaattccctgtatgaaaagaataaactcatcgcgttaatggctgtttatctcatggagcaactcaacatacaactgaaggaatacacagagctgggtacactgaaaaagacgactgttgacttcaagatatccaataaagtaacggaaaaaataccgttctctcagtacccaagtctggtttatgcaatgtcccgtgagtatgcggacaatgtgcatgactataagttttctgaaaaagataagccttttttaggaaagatagatgccatcgagaaagagcgcatggaattcattaaacaggtcctggagtttgagaagtacttgtttgataattccataattgatcgaaagaaattcgctgatacagcaacccatataagcttcaaagaaatagttaacgagctggtcaataaaggccgcgacgggaatgaattaacaaaacttaaagatgcacgtgacacagcactccacggcggaattctgaccggcactagcttcgaagaaacgaaaagccttatcaatgaaatgaaaaaataa

SEQ ID NO: 338 - DNA, 3207 bp, synthetic construct
  source 1..3207: mol_type = other DNA
atgtgtaacgagattcagactaaccaaaccgggcagaaagacaattcgctttttggcatctatctgaatcaggctcggttaaacgcctatatcgcattgtgctacatttcagaactcctgggagaaaaaacagtggatgaagattcactgtctgaaatgcctgtcttaagatttttggattctgacaaagacattgtgaaaagtaagcgcaccttcgaactgttagaaaaacgttttcctatgttaaaagttatctatgatggcgaaccaaaaaaggaacaggatgacaagttcttagaacgcacaaaaaaatacaaagagattcttacctgtctcattaaagcgttaaacgacaaacgaaacgaattctgccatgccaatacaaaaggcggcggcggggaatacgacattaagcagttgattcggtacctgaataattgtttcgatgcgagcgttagacgggtgaaagatgtgcgtgggttagaagaagaagacgtttttcatctgcgtagaaaaacgtcacagggtaaaggacgcgaaaagcgagtgattgacaatccgaatttctactatcacttccaggacaaagagggcaaaatctctgagaaaggtttggcattccttgcttctgtttttttggaaaaaaaggatgcccatgagttattgaaaaagcagcgcggtttcaaaaaagatgataccccaggatataaggcgacactcgaaagtttttattgttttcggataaaactgcctaagcccgtcatgaaatcagacgaagacaaaaatggactggctctggatatgctcaatgaactgaaaaaatgcccgaaagaaatcttcgatctcctgccaaaagaacagcaggaagaatttcgcgtcatagataccagcgatgataatgaggatgataatgaaattcttatgagacgctactctgatcgcttcccgtacctggcattacgttattgcgacgagaatgagttgtttgaaaaccttcgctttcaaatagacctgggtcgttattatttcaaattctatgaaaaacaaaccatcgacggcaacactcaacagcggtccctcgataaaaagctgaagacatttggtcgaatcaaagaagtgaaagacaaagttcaacagcaatggcaggatgttattaaaagtcctgatgagatagaggatgaacaaaaagagccttacaaagctaatacgacgcctcattataatcttgtggacaaccagattggttttgtgatgtccagagattgtaatcttccagatctgaatcaacctgatggcaaactgaaattacaaaaacccgatgcttggctgagcatctatgaattaccgggaatgatttttcatggtttgacgagcgacttcaaacaaactgagattttaatcaacaagtatattggtcgtcagcggtcgatttgtaagaaaattttcggcaccggtagcatcccgcaggatgctggtgaatatctgccagaggcactcaaagatattgaagagaatgatactaaacggacctcgtatgcgaaaaaaaagttatgcagaatccttgaagacacagaacagcggataaaggctattaaaaaaaccgagcaacgtctggtcgataaaagtaataagcccggtaaaaagcagttctttgatatacgtgcaggcaaacttgcagattttttggctcgtgacataatgatattacaatcatttgatccggccaaagatggtaaagataaactgacatctatcaactaccaggttctgcaggcaaccctcgcatattatggcgcgaaaaaagatagcatcgccgacatgtttaaaactattggattgttagacggagataaccctcatccttttctgaaagaaatcaatccttcgaagtataactcaattgttgagttctacaaagcctatctgaatcgaaagaaagggtacctggaaaaatgtgaaaaagagggtaagtttgatgaacagttcctgcgtcccagccgccagcgttatgcaaaaggcaaacgagatctgaaaactatcgcgaaacagctgttagataacccggtcaatattccgaaagggttctttcagaagcaaatcaaagaatttgtatgcgtacgtgaaccatctttggaagagctgcagatgaatactgcctatatgattcaagcctattttgagaaggaatacgggacgcagcagccgttttgctcctatcaaaagacatatccggtagtctccaaaagtacggagtattgtaaaaaagcgaaaaacaaagagatcaaggaagtcttgcgcaaaattaccgcagaaatgtcatatcgggaactgcgtaagtttattgatagtaaaataccggacggccgttatgaaccagagaatctgaaaaagaatcttctggatgggtgtcgtgacttcaagaacaatgagcgcctcttacgccgttttaaggtacaagacatggtaatgtttatgatggttgaaaaaactttaaaagatcaactggcgtttgaaggtaatgtaattaagcttaaggatattaccccagtggaagattctccctttaataagcccgtgttttgcagctcagacgtctccgctagttttaataccaacaaaaagtacgagagcggatacgttgacttcatcaaaaaaaactacaaaggcctctacatttcccagggcggtcgcattatattgaaatatcgcgtaacgtctgaatccacgaagcttaaagatataggtaagtatagacgctatctttatgatcgaagactgccgggattactgatatggaaatatccgccaaatattgaagggggtatagagattaagtatgccgacatagaagaagaaattaaagcgtacgagaaataccgtaagcagattgtgcaacagatctacatgctggaaaaaaaagccgttgatcactttaaacttgagattgagccggaagaaaatcatatcccctttaatactgtgacggatactattaagtttcgtttggcagggagcgaagagaaatgcgatacacttctgaacatccgcaactcgataaaccacaaccagttcccggtttttgatgaaaaaatagagaacgcccagggacagagtatcagtgaacgtatgttttcaatcacggagaattatgtaaagtatattacagagcacatcacagagtcggataaggactttgcgtatgtttaa

SEQ ID NO: 339 - DNA, 3339 bp, synthetic construct
  source 1..3339: mol_type = other DNA
atgttatgtccgcgcgccatcttttcgaccttattcaactttgtacacatggaagcaaaacacaccatacagtactttgacttcaccaatatcaagcataaacatttctttgcaggtctgttaaacaccgctcaacacaactttgatcttagcttacgtgaattagcaaaaagaattcacaataaggatacgaccaaagggttgattacaattgcctttaataattcggtgtctgaaagcgatttcaaagcccgtactaattacttgtcagaaagtttggcgttcattaaactgatgaactatgagaatcgtgcggaattccgcgacacactgctggtgctttataatacaattgacgggctgagaaattactatacacattataaacgcgataaaattacgatagacgagtctgtatacaagcttctcgattatcttctgctgacatcagcaaaagaagttaaaattaatcgcgcgaaaagtgaagagtataagaagtacctgagcattaagtatcaggacgaatttgaagagattattgacgagagtaacaaaaaaattgaggaagataatgcgctgttaaaaaagggggaaagaaaaactggtttaattaagccacaagatgaagttaatcatgtcctgaataaagtctttcggtcctttctgtataagaatgataaaggggaagatgaactgcgcgataatgctagctcaaaaaataaagaagacacagatttgagtacctatggctttgtacaactcttagccttgttcctgaacaaaaaacaaacagaatctttgctgtcgtatacgaaataccttaaagacacgagaaaactgaaattcgtaacttcccgttggaccctgacctttttatgttataaggatattaaacggttattcaaatccgactactccaatgattctcttcttctgcaaatgatctctgaactgaccaagtgcccaaatgaaatctatcgacaactgactcctgataaaaaacaggaattcatagaagacattaacgagtattataaggacaccatatcttttgaaggaaccaacgaacaagctctcgtaagtcatgaagttattcagaagcgttacgctaatcgcttcagctacttcacgattcggtttctggatgagatcattgattttcccacactcaaatttcatgttaatctcggcaagtttaatcatgacactaccaaaaagaagttttctaacgccatagagacggaacgatcaattttagaaaaaattaccgtgtttacaaagcttagcacggcaacgaataataaaaaggactatttttccaaaccggagaataaagagttggaaaacgattggttagagttccccatgccatcataccagttcaacaaaaacaatattggtatatggctgtcaatcgataaaaaatccggagaatccgacgccccagaagagcgggagaacagtaaactgagcaagtataagatcgcggaaaaattgttacttaaaaatactattcggaaaccgattgcgttcctgagcttcaatgaactgcctgccctgctgtattcactgctgatcgaaaagaaaactccgattgagatagagaagattatacagagtaagataatcgaacagcgtaaacttattagctcatttgacaagactaaaattatctcgaacaaacgtttaccgaaaaaattaatacgtgcgtctcatcttgattcaaccacggatgtcaaaaaattggaaaaagacatcaagactgagataagtaaagatccgatcggtgatattcgtaaacattataagaaggagatcaaaaatgtgaatgagttcactaatagtgaaaaaggtaaagttacgacctggctggccgatgatatcaaacgttttaccagtaaagagacacgcgaaaattggaaaggatatcagtacgcagaatttcaggcattactgtccttctatgacatcaacaaagacaaacctaagagctttctggaaaaagaccttaactacgactacaaaaaagataactcctttaacggcctgaactttaatctgaaaaccctcttcgatttttacaactcttaccttaaaaatcgccgggagtacctcaacaatttgttaaaagaaatcgagtcgtctaaagatgaaattcatgaaaaagtgtttataggtttcacgaagagattgtatgaaatcaaaccgatcgacatccagaagaatgtatttctcaaaaaaatcccactgaacctgcctcgcggaatttttgatgataaaccgactagttatgataaaggtggtaaggataatacagaaattgcttcgtggtttacactgagtagtaaagctgaaaatgctcaactgtattattgcttccctaaagtgtattcttatcccacaacaaaactgaaatgggataatagaaaacgtcgtaaaatacagaaatcgagcatcgcaactcaactgatctcacccaaagaacgcctgaaacaacagtatttgaaagatcttccgaaaactgtgcaggttgaaatctacaaaaacgaaaagtcaattcggaagattatgagagaggattttttcattttagaaatggtcaagcacttgctgaaaaagtcaagcattaaaggcctggataaactccagttaaaggatgtttttttaacaaaagaagagaagaaccgccgtatagtagagagcttaaaacagtctcagcgtgtgaaaggagataaaatggagaacgtggttaatgactcttatattttatcccagcaggttgcgatatctattctgaacgacaagataatcgacaccgttcagatcaagactattggcaaacttcgtcgattagaggaagataaacgagtccgtcaactgatcgaatattttccagataaaccttcgtggacggttttagagattcaatcagaaattgatgattatgatcgggtgcgaaagtttgaattttttagctccgtccacgtgctggagaagcttatctataaagatgcgaagaaaaataatgccaaagagggccttctccagaataataaccataattttcgtaagtacttgagctattactatctcaacgaagatcgtgatgcttttaactcattaccgaatttcgacaccataacgatagataacccttcaatcaaaagtgaatggtatcgcctgtatcttttggttaagattcgcaacaaattttcccacaatcagttattgagtaaagtcgattttgactcgttaaaagagattatcagcatgaattctggcgaaaaaattgccgcatttctgaaccgcgcatttgataaactcattatagtcaaataa

SEQ ID NO: 340 - DNA, 3393 bp, synthetic construct
  source 1..3393: mol_type = other DNA
atgaacaataacgcgactattcagaaacagtctgttatctatgcattcgacaaaagtgaggacaaacactttttcgccgggttgttaaacatggctgagttaaacttagttatcgccctgcaagagaccctgattcggaccattcgcaacacgaaaacaagcaacaatgcgaaggtacttatccaacaactgttcactgaagacatcatgcaaagcgattggaattatcgggtggaagtcctgagtgaatttttgcccgttactaaagccctgcagccacaggccgataaagctacgtttattaaaacattgaccctctttgccgaaacgctgaacaccttacgcaatttttacactcatcattaccacccgcctgtggagattgattcaagactgtttgagattctggatgccgtactgctgcatagcgcggtttatgttaaaaaacaacgcctgaaaacggaagatggcaaaaccatgtttccgaaacaatatgaagatgatcttcgtaccaaacttgccatacataatgaaggggtgaagcagaaacgcataagcgagagagaaaaaccggaaaataaaaaaatcccgaagaacaagttcaacgaaatcttcaacaaaaagaacaagacttacagtgaagcagattttgtgaatacatatcttaatggggtgtttcaccatttgttatacaaagatcgtaaaaaggaaggtttggaccagcttaaaaaagatgccgcatccaagaaaaaggacgagaattattttagcaaaaacggattcgtcctgttcctctcgtttttccttgacaaaaaaaatcttgaagaccttttttctcatacagaacatttccgcggcacccacgaattacgctttatggttacacgttgggtgttttctctgcatgcttttcgtgatgtccgtcgtgtattacgctcagattactcgaatgatgccctgcttctgcaaatgataggagagctgaacaagtgtccaaaagaattgttcaatattctctcgacagaacaccagctggaatttttcgaagatcttaatgaatattactctaataatgaaggcggagatgaatctcagccggattctttagtaacgcataccgtgtggcggaaacgctatgatgataagttttcttatttcgcgctgcgatttttagatgagttcgctggctttacgaacttgaaattccaggtcgtggtcggtaattatgtccatgattcccgtacaaaagaactcgcaggcatcaataaagtaacctaccgtacgattaaagaaaagatcaaagtgtttggtaaactgagcgagattgatcggctgaaaaaggaatattttctgaaaaagaatcaggagcagcaggtttcagatccaacgacagaaacaaccgaattaagcgaaggttgggaagaatatcctgtggcacactataaactggataacaataatattccgatctatcttagcattccaggttttcagaaggatagcacgcctaaagaatatcgcaccaaacgccttaacaaaaaatctattttagaacagctcactaccaccggctttatagaatctgagcctatcgcctttttatcggtcaatgagttgcccgcgctcttgtatcagctccttttcaataacaagagtgcggcacagatagagaccatgctgatccaaaaaatcacatcccaggtgtcagagatcaagcggttcaacacggaatcaactattgataaacataaaattcccaagagactgatccagttagccagcactatagctacttccacaagtatcaattttgttaaactgttgaaagacatcaattcggagattgatacgtgcaatagccgtctgaaagagacggatgataaccttaataaaagcaagtatagacgctttaataacaaacagcgcggcaaagttgcgacttggctggcagacgatatcaaacgttttgctggtaaagatattcgatctaataattggaaatctcatctgcatggtgaactgcaggctctcttagcattttacactgagcgtaaagcggacatccagttactgttggagaaagaactgggactgccattagacagtaaaagtttgctgtcaaccagcttttccgaaaacacgttagaaggattttatgtaaagtatctcaagactcgtcgcgaaatactcactgactttaaagcatccgtagataaaacaaaaaatgagtatcccaattcattggatacatccaccatagagccactgtttgacatttttgataagcgcctctatgtaagttcacacattgagaaatataagtcagacctgttacaaaaacctctgaacctgcctcgaggcatatttgataccgcgacttattttccactgcagaaaggagataaaagtaattttcagccttggtttgaagttgcggctaagacagaacactaccaagaattctacaattttccgagaaagtatgaaacaattgaacttaatccggtgtccggtaaagggctgttagaacaaaacaataataaaccggttgatccggacgtgtttaagaatgaaaaaagattacgggaaattgcgcgacaggacttctatgttctggaaatggcaaagtacatgattaagcacatgtatcccgctattcgtaccagccaaaattacacgttgaaggacgtgttcaaaacaaaacaggaaaaagaacagataaaacttcgtgcagcccaacaatcccagaaaaaagcgggaagtggtggtgaacattttacagatgattctcatcttctgttacgtcgttttccggtaaccgtagctattggtaacaaaaaaatagtagattatgttgcacttaaggacattggcaagtttcggagattggagaaggacaatcgtataaagctgttattatcatattcagagcaagaaatttggaccgtgaaagagattgaggatgagataacgaactacgagcatatccgtaaacaatcgtttttcaaagaagtgcatgtcttcgagcaggaagtgctgcagaaagttaagctgaaagccggtatagacactcacccagaaattctggaacaaaatggctaccctaatttcaaacactacgtcgcttaccatttttttaacaatgacaccatcaccttcgacaagtttgtcaaagttgatttccagaacgagaaaagtcggaaagaaattgttgagtcaaaaaacatgttattgctcaaagcgtacttcttagtcttaattcgaaacaaattctcccataatcagctcccggagaaggttgatttccttaaaatgaacgcatatatcaaattttcgggggagaagattggggactatctgctgcatttttttaaagaaagtattgtttattaa

SEQ ID NO: 341 - DNA, 2850 bp, synthetic construct
  source 1..2850: mol_type = other DNA
atgagcgctatgactaaagggctccgtaactgtaagggatgtgttaatatgaaaaaaaagatgagcttacgggagaagcgggaagctgaaaaacaagccaaaaaagcggcttatagcgccgccagtaaaaacacggatagtaaacctgcggagaaaaaagcagaaaccccaaaaccagcagagataattagtgataattcgagaaataaaactgccgtgaaagctgcagggttgaaaagtacaataatttctggagataagctgtacatgaccagctttgggaaaggcaacgctgccgttatcgaacaaaaaatcgatatcaacgactattcgttttccgcgatgaaagatacgccgtcattagaagtcgataaagctgaatctaaagagatttcgtttagtagccatcatccgtttgtcaagaatgacaaactgacgacctataatcctttatatggtggcaaagacaatcctgaaaaacctgtaggccgggacatgctgggtttgaaagataaacttgaggaacgctatttcgggtgcacgtttaacgataacctgcacatccagattatctacaatatcttggacatcgaaaagatattggctgttcattccgcaaatattacaaccgctttagatcacatggtagacgaggacgatgagaaatatctgaactctgactacatcggctacatgaatacgataaacacttatgacgtttttatggacccgtcgaaaaatagctcgttatcacccaaagaccgtaagaatattgacaattcgcgagcaaagtttgaaaaactgctcagtactaaacgactcggctactttgggtttgattacgatgcgaacggaaaagataaaaaaaagaacgaggaaatcaaaaagcgcctttatcacctcacagcctttgccggacagttgcgacaatggagctttcattctgcgggtaattatccaagaacatggttgtacaaactggactcattggataaggaatacctggataccttagatcactactttgacaaacgcttcaatgacattaacgatgattttgtgacaaaaaacgccaccaatctctatatcttaaaggaagtgtttccggaagcaaatttcaaagatatcgcggacctgtactacgattttattgtcatcaagagtcataaaaacatgggcttcagcataaaaaaactgcgtgaaaaaatgctcgaatgcgatggcgcagatcgcatcaaagagcaggacatggacagcgtacgcagcaagctctacaaactgatagatttctgtatttttaagtactatcacgaatttccggaattgtccgagaaaaacgttgatattttaagagcggctgtatctgatactaaaaaagataacctgtattctgatgaagccgcacgtttatggtcaatcttcaaagaaaaatttttaggtttctgcgacaaaatcgttgtgtgggtcacaggcgaacatgaaaaagatattacgtcagtgattgataaagatgcatatcgcaaccgctcaaacgttagttatttttcaaagcttatgtatgcaatgtgtttctttctggacggaaaggagattaacgacttgttgacgaccctgataaacaagtttgataatattgccaaccagattaaaaccgccaaagagctgggtattaatacagcattcgttaagaactatgatttcttcaatcacagtgagaaatatgtagacgagctgaacatcgtcaaaaatattgcaagaatgaagaaaccatcctcaaatgccaagaaagccatgtatcatgatgctctgacaatactgggtattcccgaggatatggatgaaaaagcattagatgaggagctggacctgattctggaaaaaaagaccgatccagtgacgggtaagccgttaaaaggtaaaaatcccttacggaactttatcgcgaacaatgtgatagaaaattcacgtttcatctaccttataaagttctgcaaccctgaaaacgtgcgcaaaattgttaataataccaaggtcaccgagtttgttctcaagcgcattccagacgcccagattgagcgctattataagtcttgtacggattccgagatgaatccgccgacagaaaaaaagattaccgaactggcggggaaacttaaagatatgaatttcggtaattttcgtaatgttcgtcagtcagccaaagaaaatatggaaaaagaacgctttaaagctgtaattggtttatatcttacagtggtttaccgggtggtaaagaatcttgtcgatgtcaattctcgttatattatggcttttcatagcttagaacgcgattctcagctgtacaatgtatccgttgataatgattatcttgcacttacagatactctggtgaaggaaggtgacaatagtcgtagtcgttatcttgcaggaaataaacggctgagagattgcgtcaaacaggatatagataatgcgaaaaaatggttcgtttcagacaagtataattccattactaagtatcgtaataatgtggcccatttgactgcggtgcgtaactgtgcggaattcataggcgatattaccaagatcgatagctattttgcactgtaccactatcttattcagagacaactggcgaaaggcctggatcatgaacgatctggatttgatcgtaactatccgcaatatgcgcctctcttcaaatggcatacttatgtaaaagatgttgtgaaagcactgaacgctccctttgggtataatattccgcggtttaaaaatctttctatagacgcgctgtttgaccggaacgagatcaaaaaaaatgacggtgaaaaaaaatccgatgattaa

SEQ ID NO: 342 - DNA, 2862 bp, synthetic construct
  source 1..2862: mol_type = other DNA
atgtcaaatgaaattggcgcctttcgggaacatcagtttgcctatgctcctgggaatgaaaaacaagaagaagccacattcgcaacgtattttaatcttgcgttaagcaacgtggaaggtatgatgtttggagaagtggaatcaaatcccgataagattgagaaaagcttagatacgctgccgcctgcaatcttgagacagattgcatcttttatttggctgagtaaggaagatcatccagataaagcctattcgacggaagaagttaaagttatcgtgactgatctggttcgtcgtttgtgtttttaccgcaactatttttctcattgcttctacctggatactcagtacttctactccgatgaactcgttgatactacagctatcggcgaaaagctgccgtataacttccaccattttattaccaatcggctgtttagatattcactgcctgaaataaccttatttcgctggaatgaaggagagcgaaagtatgaaattttgcgcgatggcctcatatttttctgctgtctttttttaaaacgcggacaggcagagcgctttttgaacgagctgcgtttctttaaacggactgatgaggaaggtcggattaagcgtacaatttttactaagtattgcacccgtgagagccacaaacatataggtatcgaagagcaggactttttgattttccaagatatcattggtgaccttaaccgcgtacccaaagtgtgcgatggtgtggttgatctttctaaagaaaatgagcgttatatcaaaaatcgtgagacatcgaatgaatcagacgagaacaaagcacgctatagattattaataagagagaaggacaagttcccttattatcttatgcgatacatcgtggacttcggcgttcttccgtgtattacctttaagcagaacgattactcaaccaaagaaggaagagggcagtttcattatcaggacgctgccgtagcccaagaagagcggtgttacaattttgtagttcgtaacggcaatgtgtattactcctatatgccacaagctcaaaatgtagtgagaatttctgagctccagggcacgataagcgtagaagaactgagaaatatggtgtacgcttccatcaatgggaaagatgtcaacaaaagtgtcgagcagtacctgtatcatctccacttgctgtatgaaaaaatcctgaccattagtggtcagacgattaaagagggaagagtggacgttgaagattatagacctctcctggataaacttttactgcggccggcgagcaacggggaagaattacgacgcgagttgcgcaaactgctgccgaaacgggtttgcgatctgctctctaaccgttttgattgttctgagggagtctcggcagtagagaaacgcctgaaagcgattttattgcgccacgagcaactgctgttatcgcagaatccagccctgcacatcgataagattaagagtgtgatcgactatctttatttgttcttttccgatgatgaaaaatttcgacaacagccaaccgaaaaagcacatcggggcctgaaagatgaagaatttcagatgtatcattatcttgttggtgactatgactcacacccactcgcactgtggaaagaactggaagccagtggacggttaaaaccagaaatgagaaaacttaccagcgctacctctttacatgggttatacatgttatgtttaaaaggcacagttgagtggtgccgcaaacagttaatgtcgattggcaaaggcacagcgaaagttgaagccatagccgaccgtgtagggttaaagttatatgacaagctgaaagagtacacaccggaacagctcgaacgcgaggtcaaacttgttgtaatgcatggttatgcggctgctgctactcctaaaccgaaagcgcaagcggcgataccgagcaaacttacagagttacgattttattcgtttctgggtaaacgcgaaatgagttttgccgcgtttatccgtcaggacaaaaaggctcaaaaactgtggctcagaaatttctacacggtagaaaatattaaaacgctccaaaaacgtcaagcggcggccgacgcagcctgtaagaaattatacaacttggttggtgaagtcgaacgcgtccacaccaacgacaaggtgctggttttggtcgcacagcgttatcgggagcgcctcttaaacgtcggtagtaagtgcgcggtcacactggataatcctgaacgacagcaaaaactggcagatgtatatgaagttcagaatgcatggttgtccattcgtttcgatgatcttgattttaccttgacccatgttaatcttagcaaccttcgtaaagcatacaacctgattccccgtaagcacatattagcgttcaaagaatatcttgataatcgagtgaaacagaagctgtgtgaggaatgccgcaacgtccgtcggaaagaggatctttgtacttgctgtagtccccgttacagtaatctgacatcctggctgaaagaaaatcatagcgagtcatcaatagaacgtgaagctgcaacgatgatgctgctggatgtggaacggaaactgctgtccttcttactggacgaacgccgtaaggcaataatcgaatacgggaagttcattccgttctctgcgctggtgaaagagtgccgtttggcagacgccggtttatgtggcatccgtaacgacgttctgcatgataatgtaatttcttatgccgatgcaatcggtaaactgagcgcttattttccgaaagaagcgagcgaggccgtcgaatatattcgccgtactaaagaagtgcgtgagcagcgtcgcgaagagttgatggctaattcttcacagtaa

SEQ ID NO: 343 - DNA, 3438 bp, synthetic construct
  source 1..3438: mol_type = other DNA
atgaaagtagtcaaaccatgtggaaactcagttgtgttagctggcggtgaaattcgccgtacaatacagccgagcatcaccagtattacttctgttaatgcaaaacaaacgcatagaccggcgatagattttttattgaacaacgagaaattttttttggctcaatgggcctcaatgctggataaaataatctctaaaccgcatcaggcaaatcaggctagcccaaattatgccacctacgaagcacgcgaaaacctcagcaaggcgttctacgtgctgtggaaagacaaaaaactgcttaacaatttctcacacaaggacaaccagcgaaaaagtttcaatcaacagtggggactgaaagtacatccatataagaaacctaataagcccaccgcaaataataaaccggaagctattaaaaaagcgggagagatttccaaaggcagatggtatgattctttagtgacaaaaagtaaacctaacaaaaatacggccaagcaccacaaaagtgccacgattcactataagaacaccgcgaagataatctatgagcatctttatgtaaaacaacgtagtatctcaaaaagatcagcatatcctcagggctatatcgccaatcgcgcaaactcaatcgaaaaaagcgttcactcgttcacgctcaaagataacaagctggcaactttatgcattaacgatcagcaccgtatcaatagactgacaaaacaatccatatccattgcacagccgtccaagtatcgcctcgatggcctgatcaaggacctcaaaattaaaacgaaacaatattaccagaataaagtttcggctgcagagttacgcgccaaaaaaacaaaaagaccggtaaaaccgccgctggaaaatcagcagttgcccttaaaagaagcgatgatttgtttatatgaacactatgctcggattttcgggaccgttacaaaaattgaaaccataattattaaggaaccggaattgtggcaatatcactgcctgatcaagagtactttaaaacaacgctacccaaaacaagctgtgcttaacaaaatctaccctgtcatcacagaggatcagctgcataaacttgctcagaatatagagacaaataaaaccctggcgatggcgatccggttgggcaaagttgtccattattcccaagacaacctgggttatgaagatatagaacacagcgatattgttaattctgattactggggtagcgcggggcagaccttaattaaacagaaagaaagcttcgcacaacattggttaattgctttatccgtcgccaatgggagcctgcgtgggctgttagatactcaagataatgctgatatctatcttagccgtggcattaacaccgcgctggaaggcattccaacggatttcgaggctcgttttaaactgctgtttggtaatcaccatcagttgtatcaggatgatcttcagcgggatgaattgttacgacagttatacggaacgttatctcagctgcgtcacgcgtcttttcattttaaaagtgagcagtccttcaatcaggtgctgttaaagaaagtgactttagacacaaccctggataataacacctcggtttctcagacactggccaaaaacatcaacaattacatagacgaacaccttgcacagcagcaagcgctcgttaaaaaaacattagaagcaagtttcgtcacaaagtaccttaatcagacccagtgtgatcaactcttatcgtcactccagaacaaccaagcaattgcgactcttctgcctaagtttaataaacttctgcatcgcgccgccactaccgaacagtcgataattgctgtggccaatcaggtcgagctgcagaataatccgaatcagcaatgcgcctttatctgtctgaaacagctgtatgaacaagacttctggcgttggttattaaaacagaaaagcagcactctgaaccatcatattgaccaggcaaagattcgtgcgaacaagcaggccaacaaacttaatgccaaaaatactctcgagcatcaaaaaataatggcgcgtatgcaacagttgcgtggtattaatgcccaagaatcattgttagcttattttagctatctttctgcacaaacggcgtcattttttcaaattcagaccaacacttatcagcataacgcccaagcagcctctgaacatagcaattttatcgaacagctgaaacaggacttcttgattcgcgcgtttaagcaatatcttaaagcagagaagtttaactatttgttacatcttggtacacccgctagttgcgtgatcgatattgataaaatcacgaaaaaaaccccagttaataatcctttactttacctgagtctgcatctcatccctattgaattcgtcaatcagctctctctgcagataaagaaatatactgtactcaccggttcggagaagttcggaaacatccataatgatatcaacctgtatctgacaatgcacaatgccattttggatataaagtggctcgacaatcgtgatgaattagccaagttttatgacaataaagcgctgtttgaacaggtgtttagtcaggataataagcatttgattcccgtcaaaggtttgcgcgaaatgttacgatttggcaaccttagcgaactgggagttatatttgaacgttcaatcgttgaagccaatgagattaattcgctgcaagacaaacagaaaaatattgctgccattcaggctaagaaagcaaaagcccatcagaaactgtcacagcaaaaagacattaacaagcaagacaaagcggattacaagagtgacgtagataaagtgtccgagtacaaccacctgaaaaaccaggtttatcttcataatcacaaacagacccatcagttgatcatgacgattagcggccgcttagtggggttttctcgccggtacgagcgagatatctattttgtcctgttggctctgctgacactgaacaaagtgaaaacggacgaactgtcacagaatttcctggcgtctattcggtcgggtcagataattaaggcatccaatcaactgggggagcaatacgcaaacatcaaaagtaagctgaacctgctttttcagatagagaagcatagagaaatccggaatcgctttgcacattttgatgatcttcgtaaagcggagtcgttaaacataacgcaacagattaatgaagcacggcagctcatgagctatgatcgtaagagtaaaaattccgtagtgaaatcaatactgaacattgttaagaaggacaacatctcaatagattttactatggacaatcagcataatcttaccttgaaatctatcaaagcggactccattattcatctgaaagataaagatatttctgaaaagccccaaggtaaaaagtacaagaatgctgtaaaaaaattattcgagaatactgtgtaa

SEQ ID NO: 344 - DNA, 3483 bp, synthetic construct
  source 1..3483: mol_type = other DNA
atgaatgttattgagagtttcttaccgctgaacaccaaggaaaaaatcgatcagcttatggctattattaaaagtgaacctaaagcaatgaatcaaaatgcctggcacatgatttttgggaacatcggtaagagtaaaatgcaaatgtactttattgagaaatacccgcagtcactgtttgctgcccctggaaattatattccgtcttgtaatggtcagggtcaggaagaaaaaaatcctcagcagcctcaagtccagcagcacgaacgtcagacagatatcccagttccgccaacctcgttgaaagacaatcgctttttgtatgcgacgtacattgagatggcgtttcacaatatgtttctgaacatcaagcacatctatggtgtagtgttcggaagagatataatggctgaagccaaagccaattatgaggcacttaacccggaaaaaaaatgggatgaggattttgcaaatgaatttctggtatggaaaccaatgttcgaggcttttaacaatggaaatgtcgaggagaaacagaaagtgggtgaaatgttatcacgtcactttccgctgttagtcccgtttactgattttacgaaccatgagtccaactataagaatctcactattgtcggtattttacggcgcctgtcgcaggtcctgcgtgtattgcgcaatctttactctcattatagaatagaactgttcgagaaccagaaaaaagtatatcttgacaatgaatatcttatcattcgctgcaccatgaatgcctatatgggggctcggcgcgttattaaagatcgtttttcatacgatgaaaaagatatgcgttgcactgatcaatatcaattcgtagatgaacgcggtcgtcgattgaaggaaaaagtcgaaatcaaaggatttcgttataagattggggaaaaaggaaaagattctaaactccatttcacgccctttggcttggtggctttcatatcgcttttcttagagaagaagtatagcaagattctgactgacaaacttagactgattcccatacaggaccaacatattattaacgagatgttggcggtctatcggattcgtttaaacgcacagaagctgaacatatctaaagatgcagaccttctcgccttagatattattaatgagctgcaaagatgcccgaaagatctgtttagcttactgagccccagcgatcagaaaaaatttcgtcatgaatcggaagccaacgatgaagttctgatggttcgtcattccgatcgatttccatttctggttatgaagtatattgacgactgtcagctgtttgataatatacgattccaagtatctctcgggaagtatttttacaagttttatgataaaaattgtatcgacagtgagaccagagttagagcactgagcaaaaatcttaatggttttggaagactctcgaaaatagaagcaatgcgtgaaggttgttgggaagattctatccgccaatatgatgatatacacaagaacaccgtggatgagaaaccctatgtcacagatcatcacgcaaagtatgtaatcaatggtaatcggattgccatgcgtataatccgtgaagaagagaaagcttatcttcctgaattaaacgcagaaggcgttcgcaatcttgcaccgacatgctggttaagcatctatgacctgagctctctggcattcttgttataccttaccaatggtgactttgtggaaggaataatcgagaataccgtagagaattaccataaactcttcaaagatattgaaaatggcacgatgctgccggtggcgaatgaagaggagctggacagcctgttgtgtcgcaactatgggggaattaaacagaaagacatcccaaaaaatatgttagactacctgctgcggaaaacatccgatgctcgcaagcgtttcgtggaattttcgaaaagtatcatcgaccggatgatatcacagacagaatataagatagaacagatcaaacgtcaggaagaacaatgtcgccagaacaaaattggcaagaaatcctatgtaatcattaaagatggtaaactggcgtcctttctggctaatgatataatgctgttccagccaaacgatagcgaaaactccaataagcttaccggcttaaactttcgcattttacaaagtacactggccacaatgaaagaatgcggcattgatcaattaaaacgtacgttaacgtcggctcatattattggcgaagcgaatgacgagtactgcaatcctatcgttatgaaaatgatgcggaaacgtgtgccagaaaatacacgtgacttttacaaaagttatcttaaagcccggctggagtatcttaatgaatgcaaacgcaaagcggattacgaaaatctgtcctttctgcatagtaaccgttcaaagtggcaagaacatgatgatgaattttgtcgtttgttggcgggccgctacctgcacgatgaaaatggcggcacggaatttgaaaaatcaattaacttgccctctggtatgtttgataagtatatccgtgaaaaactgtgcgaagttccggcgctgaaagacattgcgaacgatgagaccaaaaacgtttcatatttgatctacgcatattttaagaacgtttgtaatgacgattgcctgttcttttacgaagctgggcgctcataccgcttattcaaactcttaggcatgaatggttcaaaaactgcgcaggatattcgacttatgctgaacagaaagcacaaaacttcactgtacaaggaaatagataagtatctcatcagcattcctctggcggagcgtgaacaagagaaagcccgcttaatgggcttattaaaagggatgaaaaacagtgaaacagactttaaacgcttcaagatacaggacattctgctgttcctcatagccaagaagctgttcaaagacaatgtgcaggacgatgttcagcatactgccttcgagagcctcaaactgaaaagtctcaaagataccgacggattatctcagaagattcgaatctctgtgaaaattaagagcaaaaatggttatgaaaaggagatcaaaaaaccggagttgaagctcaaaaattacgcggatttctataaacttctgaacgaccggcgtttacctgcattgttggatcttgtcagagaacattcaatcgattatgattctctggtggacgaattcggtgggtacgataaagttcgaccgaatgttatgaaagatgtgctgaaatacgaacggaaatattatgataaccatgctgactccgatgagtcattagacttcggcagcatgttagataactccagttttaacgaggaagagaaagatttgttacgaaaaatacggaatagttttgcccataatacctatcctaagtattatattgtgaacaaagcgggcgatccacatctgcccgaaaaagcaatcaaatgttccgaaaagttttctagcgacattaataacgagtaa

SEQ ID NO: 345 - DNA, 3858 bp, synthetic construct
  source 1..3858: mol_type = other DNA
atggccttcgataaaccacgtccgaaacggcggcaggcacgctccgatttctacataaccgataaggcgataatgggtggatattttaaccttgcgcaactgaactttttcaagacgttaatggagatcttcaccaaggccggtatcgatgttagtaagatcaagcaagacaatagtccaaagtatctgatgatcttgatcaaaaaactgacccacgatgatgaaaagattgatgacaagaaatgggcggacgccttagaccttagcaacgaatgtctgctcaaactgcagcagttattatacaaacacttccctttcttaggcccagtcatgggtggggaagctagctataacatctacaaactcaaagatggccatcccgaagtgaaggtggcaaatgatgtcatgcgtggtgtgaaacttgaggattgtttagcagtggtgagacattttgcattatgtctgaacgactgtcgaaacttctacactcattttaacccgtataacccgattgaagcgcagaaagaacagtatctgtcccagaacaaagtggcagtttggctggataaagtgaaagatgcttcccgtcgcatcatcaaacaaaataatcagttaacgtctcaggacatggaatttctgactgggatagaccgtatgaaaccccaggacaaggttgatgattttggaaatatcatgaccgatcgtcgtggccgtcccatcaaagaatacgttgagtacgaagactattattttcgaattcgcggcaaaagatatctggtggatgcggccggcgcaaaacttgtagaccaggaacctcgtaatgcactgtctgattttggcgtagtattcttgtgcacgttattcttagagtctgaccaggctagacgaatgttagatgagttacgcctgttcgagaccgggccgtacgacggtagccgtgatggagatgaattcaagaatgacatattacgggagattctgcttttttaccgtacgcgtgtaccgagaggtaaacgcttggatcctatggacgatacgacactcctggcaatggacatgctcaacgaattgcggaagtgcccgatgcctttatatgatgttttaagtcgggaaggtcagggtttttttgaggacgaggttaaacgccctaatgatcttacccccgaagttgccaaaagattgcgtagctctgatcgcttcccgtatcttgcactccgctacatcgaccttaataagtgttttgataacatccgttttcaggtccagctcggcaagtttcgttataagttttatgataaaaccactattgatggggaacaggtggttcgcggcttgcagaaagaagtgaatgcgtacggtcgcctgcaggacgttgaacattaccgtcaggaaaaatatgctgacatgctgcaacagactgaactggtggaaacaggagaggaagatatcacaattgcgaattttattccggatacgccgcagtcatccagttacctgagtgatcgtaccgcgagctataacattcataacaacagaattggtttgttttggaatatgccgggtgaacaggaagttctcgcgggggacgaaaaaatgtatcttcctgacctcaatgtagatgataatggtaaagcggatgtatttcttccagcaccaaaagcatctctgtccgtacgagatctgccagctctggttttttatctttatcttcaaaatcaacatcccgatttgactcctgcggaagctatcattcagcagaaatataatgccttagtgtcgttcttcgaggacgtctcaaccggccggttattgccagttaaagatatagctgagctcgaggctgccattgacaagtatggccatctgaccgttcatgaaattccggaaaagttgcgcgactatcttaccggagttgccggtacagaagatgatgatgattgtgcagaccggctggactgctatgcaatgggtattctggaaaaacgctatcgccgtgtcgccgcccatattgatcagctgaaagaggcgcgcaaaatggtcggtgataagatgaatcgttatggaaaaaaatcatatattgacgtgcgtccgcgtcgcctggcagaacagttagcccaatcaatcgttgattggcagccggccactgacaacggccgtcataaaatgactggcaaaaattttcagcgccttattgcctttctggcgagatatactgatgaagttccggttcaagaaattaaagatctgatgacaagagcacgcctgctggatgggcctgtggcgcacccgttccttcagcaggttttagataaaaacccactgaacattgaggtactttacgacttgtattttaaagaggagaagttgcacctggaaaattacctggagatagagaccaacaaacaaggagaagaagtgtttcgtaaaaaagctagtgttgatctttcacgcattccttttctgaacagcggtcgtctgcgttttcataaacgagattctgccagttttcagagactcgcagctagatatatgcaggtagacggacgacagtctactatattattacccgatgggttgttcacaccacatatactgtcagtcctgaaatcggaataccgcgaccttcaggatcatttgcaggatcaagagctcaaccgtaatgcttcgtatcttatgtctgtgtatcttgaatgcgtcttgcacgattcggcccagccattttatctgagcaatagcaatgattctccgttcgcccgtcgatacgatctgtttgcaattttgcagaataaaaaaaagggggcggagttactccccaacccattagctccggtagaaattaatcggcggctgactgcaaaaacaccagatggctctgctaaacttattgaacgtgatatcaaagcgctgttagacgatatggcgcgcaaaacagaggaacggatccatgatctgcaacaagaatatagccgtaaaaaagaaaagcaagcgcaagaagaacgggtgaaactggagcgctgctttatgcgcaaaattgctgatgttaagaaacaggcccaagaggaacgcattaacctgcagagacgactcaaacacaaaattactgatgtcaaaaaaaatgaacggaccatccgtcgttacaagacacaagatatggcagtttttttaatggcgaaacagatgctggccaaccagctgtcctggcagaatcaagagggtgaggtcccgtttaaacttgctaatgtgtgtaatgaaggctttttacggcagacgatgaaagttagctttccttatgaggtccctctcaaagaggacaagaccaaaaaggtaacgatagatatcgttcaagacaatatgagtctcaaaaattatgggctgctgtacaagttatatcacgatgaaagagtagtgacgctgctgcaaaatatcgtggatcaacagcagatatcatttgctgaattaacagcagaactgtccttatatgaccaaaatcggtcaaaggctttcagtaattttcaacagttcgaaaaattagcgttcgaaacaaataaagaggccctgacccatccggaacaccggggattctttctggagaaagtgaacaaaaagaatcaggtcatacgttacgagcgccgtaataattttgacgctttgctggatctgttggatgcaattgaagcccatcaattagaccctcgtgaacgccagtggctgacgagcgtccgtaacgcattttgccacaattcgtattacaagatagatatgcaacaaatagagaagaaattgcccacgattattcaacagattgtagaaatagtacagcgaattacagataaagcctcgcacccttcaaacagataa

SEQ ID NO: 346 - DNA, 3996 bp, synthetic construct
  source 1..3996: mol_type = other DNA
atgtccacgagtgactctttttactcgtttggagtagattataccaagacctatgaccaacagccggattgtcgccgccacgtatttggcgcgtatgccaaccttgcgagacataatatgaccctggttgtaaacaccattatgcaagctatcggcatgccaacctttaatgagaacattatctcagacgctttcaatagcacacacagaaaagagatagataaactggataacattaaaaaagtcctcttgcaggagcgcttgtatcgtcattttgcttttctgaaacggatgaaattagaagatagcaagaaaaagactgtgcagctgaacacgttgttagagactctgagcgattttacacgaatgatggcctatatgcgtaatttttacacgcattataatccgtataattcgcgggatgaaaaagaaaagcaaggcgatctcaataaaaaaatgggcgaacggttacaattcctcttggagaatagccttcagatgttgaaagacacagaaaagttagatcacgccaaaaatgaagtcttgtcctctctgcgtgttccagaacggaaaactataagaccgggggatacagaatactcaaacattcacgacctgtacttcacgaaaaataagcgaaaagggatcaagtacgacaaggacacgaaagtgttcacgcagcaggtctatatccttaaccccgcttatccagccaaaatgaccgatagtgacggctatctgtctcttgctggtatggtgcattttctgtgcctgttcttagaaaagaagatcgcgttcgaactgatggacgaagttgggtttacacagcaatgtcattttaacggtagagatgcagagcaacaattgttatacattaaagaggtgatgtgcatgaatcgtgtacgtatggcgcagcctcgtttagactctgaaatgagtgacaccgccttagcactggatatgattaatgaattacgcaagtgcccagaacctctgttcaaagtgctggataaagaagctagaaatgaattcaaagatgatgcaactgttcagtgggaaatggagcacaatgttgaagcgcgtccaggggaagatgaagagaataacaataatgaggatgacatcgaagaacccgacgaaacaattcgtgaggataaggctgttccgcgatctacgtttgtacgctggaatgatcgttttccgcagatgacgctgtcctacatcgatatgcagagtgtgctgcctaccatacgttttcaactgtacctgggtaagtacagatttgcattttatgagcatgataaagaatattccgttgataatgcggagcgcttacgtgtgttacaaaaagagatgcatggatttggacgtcctcaagaagtcaaagcgaatcttaaagataagtggaaggactactttgaacacaaaacaatagaaaatggtctgacaatgaaagaacccgataaagcaggtcaggccccgtatgtcacggaacagaatccccagtacgcaattgatgaaaaatctcattcgataggtattcgttggggtgagtggagctccggtcatggtggctcccattatggtgaccttgacaaactgaacatgttcattccttgtctgcctaaaccgaaagccgatgaagataaagataaacagcgtaaccatgccgaaaaattattaccgcctaagtgcatgctgtccctgtatgagctgtcaggtttagtcttctatcactacctgttaaaaaagtgcggaaaagaaaccggacaggtcgaacgtcatataattacctaccacgataatcttgtccgatttttgaccgatgttaaagaaggtactatcattccggttactgatgtggatgaccctaaaggttatcttgaaaaaatgttgatggaaagttatgccttgcgtttatctgacattccagagcgtataaagaagtaccttcttaatgagacgaaaagtcgcgaatatcggttgaaagaaagtgccaaaaagcggctggagatacgcctcaaaaaagtgatgaaagatcttgagagccatcaggccaaaaaaaagcgcattggaacaaaagagaacaagtttaatcgcaaacgatcaaccatcaagacagggaaacttgcgaaagatctcattcgtgatataatggattggatgcctcgcggcagtgtagggcgtatgaatcttagcggtgaatcttatatggcaatccaggccgcgttgaccatgttaggacaacagtttgatcgtggcaaggctaatgtggaaatctatgatctcgtcgatattttggtgaaagccaaactgataatgccagatagcgatgttgagggcgcagattttaacccatcacattatcatccgtttatggatgatgttctgacagaagatcgctgtggcccggaaacttccttagaagatgtctatgaatggtatctggaagaagagattgcgcatattaagcgactgattagctcaatcaacaaagtgtcaacagatagcctgcttatgaagcagtataatctcatccccttcctgcactgtggacgcgaaagatggaataaggttgatgacgaagctattaaaaagttggctgagaaataccttaacaatccaattcagcttccaaactcgctgtttgcgaaacccattttcgaattactgaaggaagtagcccaggaaaaaaactatgatcggttatcacaagctctcgaggcagctagccaggatgcgaataacctctcaaaaaacaccgcgtatctcatagggttatattttgagatggttgaaggcgatcacagccaagcattttacaattcatgtccagcggacgatggcaccgttagtccgtatcgtcacgtatatagagtgttcaaaaaactctacggcgagatcatcgaaaacactaaccgcacgacatcaccggcatattctaagaaagagatctccgatatcttagcagggcgtgaagtgaatggcaaaattctgtcggaccgtatttctcgctatgtccagaaagccgtcgatgaattcaaaaaacagaaggacgatgaccttaaacaatatcgtatcgaaataaaggatgccgccttcaatgaaaaccgggttaaacatctgagaaagaaagcatacgaaatatttgaggaagttgatgttaaagttgaccaaaaacgggaagaatttgagcggttaaccgatcagtatcgtcaagaagtggaagctaaactgaaaaaactgttgaaaaaggttcagcttaatgagcgcgcaattttacggttcaaaactcaggacattctgttactgatgatgtctcgtgacattctgaaaatggggagtgataacgagtttaaactggaaaatgttttgtcggagtccttacttgagaagcgagttgacttttcgtggaaagtaagcgtgaacgaccagactaaagataatgtgaccacttataagacgatcgaacagaaaaacatgaagatgaaagactatggtcaattttacaaatttgcgtcagatcatcaaagactggaatctcttctgtcccgtttatctccgtcagtattccagcgcgcagaaattgagaatgaattcagttattatgactcaaatagaagcgaagtattcagactggtctacatcctggagagttttgctctggagatgaagccgggtctgaaagacgacaacaatgcgaaagaaccttggttcaactacattcgaaagggaaaaccttcgccgaaacggaactcttttatcgagctgctggaagtgctcatagcaggtgcagatggcattttagacaaccaggagaaagaactgctccgcgagattcgcaatgcgtttggacataatacctatgacgtggatttcgagactatctttagcgggccgcgcaaaagtaaacgcaaagtacccgaggtagcaaatggtattaaagacaatatggaagaaaaaacaacgaacgttttggaaaaaactaaaaaataa

SEQ ID NO: 347 - DNA, 2733 bp, synthetic construct
  source 1..2733: mol_type = other DNA
atgaaacagaatgatcgcgaaaagaatagcaaaattaaaaaatctgcagccaaagctgttggggttaaaagtctggcacgcttatcagatggctcgacagtagtttcttcttttggaaaaggtgccgcagcggagttagaatctttgataaccggtggggagattcgtaaactttccgacaaagcgatcttagaaattactgatgacacacagaacaaaaatgtgtataacgtgaagagttcccgaattccgaatcttacggcgcgcaccgataaactgagtgataaaagtggaatggatgaccttggttttaaacgtgaacttgaactcgaagtctttggtcaatcatttgatgattcgattcatatacaaattgcccatgccgtttttgacatccaaaaaagcttagcagcggtgattccaaacgtgctgtataccctcaacaatcttgatcggtcatattctacggacgatacgaatgggaaaaaggatatcattggcaatacacttaactatcagcactcctacgataatttcgataaggaaaaactgggtgagttcaaagaatattataatgccgcaaaggatcgctttagttattttccagatatattatgtgttctggagaaagttaatggcaaagatcgttatcagcccaaaagtgaagaagatgcctttaacgtcttatcctctgttaatatgctgagaaactcattatttcattttgcacagaaatcaaacgatggtaaagctcgtatagctgtctttaaaaatcagtttgatagcggctttagccatattaccagcacagttaataaaatctattcggctaaaatagccggggtcaacgagaacttcttaaacaatgaaggaaacaatctgtatatcatactgaatgccaccaattgggacattaaaaaaattgttccgcagctttatcgtttctccgtgttaaagtcggataagaatatgggttttaatatgcgtaaacttcgggaatttgcagtagagtcgaaaagtatagacctgtcccgcctgaacgacaagtttctcaccaataaccgtaagaagctctacaaagtcatcgacttcatcatctactaccacctgaataaagtgctgaaagactcgtttgcagatggctttgtggcagccctgcgtgcgagccagtccgaagaagaaaaagaaaaactgtacgcacagtattctgagcgtctctttgcagatgaaggcttaaaatctgccgtaaaaaaagctgtggacatgatgtcagacactaagtttagcatttttaaaaagaaggccccacttgataaggccttgattgagaacattaaggtgaactcagatgcaagcgacttctgcaaactgatctacgttttcacgcgattcctggacggaaaagagattaatatactgttgaacagcttaatcaaaaagttccaggacatacactcctttaataccaccgttaagaaactctccgaaaacaatctgataattaacgcggattacgtagatgattatagcctgttcgaacaaagtggtactgtcgctagagagttgatgctgatcaagagtattagtaagatggatttcggactggacaatattaacctgtcttttatgtacgacgacgctttgcgcaccctgggtgtatcagatgaaaacctgcccgaagtgaaaagagagtactttggtaagactaaaaaccttagcgcatacatcagaaataatgtattggagaatcggcgttttaagtatgtaattaagtacattcatccgtctgatgtccagaagatcgcctgtaataaagctattgcgggtttcgttctgaaccgtatgcctgatactcagataaaacgctattatgattcgttgatcaataaaggggcgaccgatatgcaagctcaggcgaaagcgttattagattgcattacaggaatttctttcgacgccattaaagatgataaacatcttcataagagtaaagaaaaaagtcctcaacgttcagccgaccgcgagcggaaaaaggcaatgctgacactgtattacacaatcgtttatatcttcgtgaaacagatgttgcatatcaattcactctacacaattggctttttctatcttgaacgggatcaacgctttatctattctcgtgcaaaaaaagaaaacaaaaatccctcgaaaaattcatacttgaacgactttcgtagcgtcacggcgtattttattccgtcagagattatggagcgcattgaaaaaaatgaaaacaaaggattcctgaaagagtttgaggaagcgtggaaaacttgtggggaaacaagccggttaagaaaagaagatgttctgttgtatgctcgctatatcagcccagaccacgctctcaaaaattataagacgatcctgaacagttatcggaataagatagcacacattaatgtcataatgtccgcgggcaagtatactggcagtattaaacgaatggattcttatttcgctgtgtttcagcatcttgtacaatgtgatattttgtcaaatcctaataatgctaactgcttcaaaagcgaatccctcaaacctttattactggatatgcgattcgacggcactgatgaaaaattatattctaaacgtctgaccagagcgttaaacataccgtttggttacaatgtgccgcgctacaaaaacctgacgtttgaaaaaatctatttgaagtcgtcaattaatgagtaa

SEQ ID NO: 348 - DNA, 3813 bp, synthetic construct
  source 1..3813: mol_type = other DNA
atgggcaaaaaaaagcatgataaacaggaacctattgcgaatcgtcacattttaggcacctacttcaatatggcgtttgagaacttcaatagaacaatgtacattctctgtgaaaaaaagctgaaaattagcacctcagaatatggcactcctgatactgaacaccttatcgcagatcagcctattcagctgcgtaaagctctgttccgttatcttccgtttttggcacctattatggatgattgggtaggatatcaactcagaagtaaaaaatccaaaggtaatggcggcgacgagaacattacccaaaaacagaaaacagccaaactggacagttcaattgaagatatcgttagccagttaaacatttttgcccaagagttgcgttactgtcgaaataagtatacccacaaaaacgcctatacgttagcctgggaagatgaggagcaccttcagagagaaaagcagatagcgaaaatgcttgaagtgttaatgaaggcagagcgtgaacttttgaaaaatcgtaaagatcgcgaaaagaaatcgtcggcgatggaactgtttttaaaagacggggaccagtattactaccgcacaaataagggtaaaactgtgcgcaacaaacagttctatttcaatcccgcctcattcgagctcacgaaaaaggggcaggttgattacgacactatcgcactgaccgacttcgggcgcttttatttttgcagcctgtttcttcggtcacgcgatgcggagcggtttgcaacggaaatgaaaatttttattgagtctccatggccggatattaaagataaggattcaaatccaaccacttatactcctagcccggaaaataaaattatgcgggaagtgatgcaaatgcatcgaatccatgtaccccgggaaaaacgcatcgatgccgtgccatctaaaggtactttgttaatggatatactggaagaactgcggcgctgtccgaaaattttatttgatacgttttgtccgaccacgaaaagcagtttcaatcacatagtaattcaggatgatggtaccaaaacatctacattaatggttagacatcaggaccgctttgctcagttagcattgcggtatattgatcaaaacggtttattcccgaatatacgttttcagctgcgactgggcttatttcgttttagattttatgataagaccctgattgatggtaccccgtgcatccgtaccgtccacaaagagctgaacggttatggtcgtcttcaagtcgttgaagaaaagcgcgtaactaagtggggagaccgttttcaaaaagtaaccacaaaagaaaacgaaggatatgagattgaacagctgcagccggatacaccacaaacggatccttatgttacagattggcgttctacgtacaatattcatactgggcgtatcggcatgtcttggggcgaagtgaatgtcggtgggaaaaccgaagccggtagcgccctgctgccgaaagttgatcgcaaaagtaatggagacgattgctactatattcccgatcttccgactttgaagtcggatgacgggaaaaataaagatcgtaaggtcaacatcccacaggacgcgccactgtgtaccatgagcacctatgaccttccggcactgcttttttatcaatatcttatcgacagttatggcagaaaaggagcagatgagaaaaaactccccacatccgagaatataatcctggaaaaatgctatgccctcaaagcgctgttcaaagccgcagaagacaatacctgtactcctaaaagtctccgggaaaaagaacgggaattgggtctgagcgacaacgagattccgaagaaactgctgtcatatcttgatggcgagaaacacaacccacagcaaaatcgtaaaaaacatgtagagcatgttttaaacggcataattaatgacatcaatgggcgtttagagagttttgaaaacaaagagaagcgaatcaaggcgggcgggcgtaataatcgctatggtaatccacatcatgccgacgtccgccatggatccttagcgcgctatcttatgcggagcatgttacgttggcaaagtgttgacgttgaatcacctcattttggtaagctgacgtcattgaacgcacgtaccctgatgggggctttagcagcttttggtagtggggatgaacgcttaccgttgaacgaaattctcacagcggcgaatatgattggtggtaataatccacatccttttatcgaggaagccataaacggcgcggacaatatcgagaaactgtatgtcgcgtacctgaaaaacgagaagaaacatgcagaaaaaatcttacgaaatattgacgaacacttgcagtctttgccgccttttttgagagcctcagatgagcaaaatcattggggtgtggatcttgagcagcaagcatatattaacaagtacgccgcgaaacttagcgaattacctatacaattgccagacggtttgttcaccaagtacattgtcgaattactgcataatgccactaaaaaatacagcgaactgaaaatcatggatagcattgttgattcagataaaagaacgacggataaaggcggacataaaattggcgataatccgtcctcttccgctagtcatataattgcgtgctatttcgagaaagtgttaggagacaaaagtcagaaattttacgatagtcagacgaaagactataagcgcttctacgagaatatctctaaactgaatcccagacgtgaacgcaataaagcactgatacccgattattttacagctaaagagatccaggaaaaaatcaaagaagctcgaaaaagtgtaaaagggaaaaacgatgacgatgctactactctgagagataagcttaatcaagtcgaagaaaaagaacgcgcaatacggctgttccgggtggaagatatggtgttgtttctgtcagcgaaacaaatgctgatgtccgtcgttggccgctctttaacagaagacgttaatcagacaaatgcattacatgagtcgaaagataatctttctcagctgcgtattaaggcaaaagagctcaaactgggccaatttggttttgatgaagattttagattcttatctgaaggagataatgaagaagaacgtaaagagaaagatcagaccgaatcgttgctggagtacatctatccttataagatacgaaaggaaggaaagcttgtgggtacgatcaacataaaacagaagggactgtcactcaaaaattatggcaacatctattcgattctcggtgatgatcgtctgaagtcactgatggaaggactctttgaaatcggtgtatctgaggtgacctttggcgatattacatccgaattcgcaaactttgaccagctgcgttccacaattttaaaactgttgcaggacaacatagaagagattgctttcaatcgcaacatatcggtactcaacaatccgcgtaatcgtaacttctactccgttaaggataaagacgggaaccagctgaaaatcaagataacagacccagttacgaacgaaattatcgctctgtccaaagatgctatccggaatcagtttcccgagctgattaaaatgttagaagaatatgaagcggatcgcgtgagcattaatgaactgcgcaaggctgtggcccacaaccactaccccaaggacatttcgaagttaaagccgacgaaaaacaaaaagctccagctgccgaacatagcccaccttgccaatgagaacgcaaaaaaaattatagatgctgctcagaaagcgtctgctgagaaagaaaagaagagcgagtaa

SEQ ID NO: 349 - DNA, 3873 bp, synthetic construct
  source 1..3873: mol_type = other DNA
atggctaatacgcagttcaaactgaaatctgttgattatagcaagccttacgatgaacagcctgagtgtaaacggcatgtcgtgggagcctatgcaaacctggcccgacataacatgaccctgaccgtgaatactataatgcaggccataggcatggaaattttcgatgaaaataacatcggtgacgcattcaattccagtcatcgaaaaaaaattgacgccctcgacaatattcagaaagttaaccttcagaaacgtctgtatcgacactttccgttttttaaacgtatgaaattagaagatgaagacaagaagtctgtccaattgaccactctcctcgaggtcatgagcgattttacctcttgtatggccatcatccggaatttttacacccattatcatccgtacaacagcccagatgaaaaaaaacgtcagctggaattgaaaaagcgtatggggaagagactgcagtttctgtacgaaaacacctctcaaatgtttaaaactacggaagcgctggatcacgaatcaaatgaagtattaagcgcgttgcggattcccgaggattacatcgaagagatacttccgggcgataaagagtatgataaccttttcaacttgattaacgaccctagaacctcgaagtttaaaaaacaaggtctgaaactgaaccagcaaaccaaagtgatcacacgtaaaaaagttcgttttgtgcgtaatccggactatcaagcttatatgatggacgaaaccaacggaatgtctgatgtagcaactatcttctttctgtgtctgttcttagataaaaaggtgtcctttgacatgatggatgaagttggttttaccaaacagattaagttcaatggtccgcaggctgaccgccagttactgtatctgaaagaaatcatgtgcatgaatcgaattagaatgacgaaagcgaaacttgattctgaaatgacagatacggctctcgcgttagatatgctcggtgaagttcgcaagtgtcctaaagccctgtatgaagttttagataaagatgcccgtaatgaattcaaagatgatgcgacagtacagtgggaaactgagcacggcaaagaagccgtgtccactgaagcattagcgtcggaatcagatgaggatgaattaactgataaaaatacgcctcgctcaacatttgttcggtgggatgatcgttttccccagatggcgcttcggtatattgattatcaaggcctgttcaatgacatacgtttccaactgaacttgggcaagtatcgttttgccttctaccaacacgataataaacagtcagttgataacgaggagcgcttgcggattttacagaaagaactgcatggttttggacgtatacaggaagtcgaggagaaaaagaatgaaaaatggaaagaattatatgatgagaagacggtgaaagatgggctgacccaaaaaaagacagatgaagcagggcaggcgccgtatattacagagcaatacgcacaatatgcgatcgatgagaaatcgcattctatcggcctgcgctgggaaggttggaataagaaagacaaaagtaaaggtcactatggtgatcttgataaactgaaaatgttcatcccatacgtaccatccaaaccgaaagaagaggaacggcagactaaccaggccgaagatcttatggccccgcaagcaatgttaaacctgtatgagttaccagctatattgttttatcagtatcttctggataagtacaagagtgatacttccaacgcggaaaacattatcaaaaccgcatacagcaatctggtcagttttttcaacgatgtcgatcaggggttattggctcccgccgaggatgcagatgaaaatgaacgcattagtaagatatccagcttattagaaggataccatcttcaaatgtcagatatcccggagaagctgcgcaattatctttgcaataaagggattgactatgatttgaaaatggagaaatcagcaatcggacgcctggaagaaaagaaaaagcacgtcgaaaaagcactgtcctcgtataaagacaaaaagaagataattggatccaaagacaacaagtttgacaaaatgagagcttcaattaaaaccggtcagctggccacttggctcattcgcgacatcatggattgggtcccaaataaaagttctgctcgtaatcgtttgacaggtcaaaattatactgcgttgcaggctgcgatggcgttatttggtcagcaagcgaattcaaatagaagttatctggaatcatgctttcggaatgctcaccttctcccgctggatggcaaaccgtttaacaaaaatacacatcatccgtttctcgaagacgtcctgcaggctatggaagacgagacgttagagtcgttctatgagaaatatctcgagtttgagaccaagcatatagccaaagtaatcaagacactgaaaaacggcaccgattttgacgattattatcaagttccttttctgcattgtgatcgtcaacgctgggcgggccctgataaaaatcaggcagcccaatatcttaaacgcccactgcaattgcctaatggcatttttacccagccgatctttgatcttctgtggaaaatcgataatcttgaactccataaagcattagaagagtcacagcaggccaatggtgacaatccgcccttaactgataacgtggcttaccttatgcgcttatattttgagtttgtggaacatgatcacgcgcagcccttttactacaccactacgacggacgggaataaaagtcattaccttcacatctaccgaatttttaagaaactctacggacaacccattccacattcgaataaaacaactgtgcctgcatatacaatagatgaaattcgtcatctgcggaaacaagctattgccgatattgaagaatatgttgacaatgaaattgagaaatggcgccgtacaaaacaggatcgattcgagtcgaaacttagaaaaaaattgaagaaagagaacgacaagcggtataagaagcacgaaaagcagttaaacataaacgaagagattcagaaagccgtgaaaaaggaaaccgatacgatgcgtacagatatgacaagcaaaatgaaacgtcagttgagaaatgtgtatgacaatgagagaaccatacgtcggtttaaggcacaggacatgatgttactcatcatggcaagaaatattctgaaggcgaaaagtaacgataaagacttcactgatggcttttgcctggaaaatgtgttcagcgacagcttacttgataaaccaattgacttcgaatggaaagttaacataaaaggtgcttctaagacgatcaaacaggaaggtatgaaaatgaagaattacggacagttttacaagtttgcttcagaccatcagcgacttgaaagcctgttaagtcgcctgcctgattctctgttcctgcgcgcggagattgagaatgaattagcatactatgactctaaccgtagcaaagtttttcgtcaagtttatatcatagagagcgaagcttatcgcttaaaaccgggcttgcaagatgacgcaaacgccagtaaagactggttttacttcacagataaaaaaacacacaaacagcgccccattagaaatagcttcattcagctgctggaaattctggccgcgggtgaagatgggattttagataatgacgagaaagttgcactgcagaaaacccgcaacgcatttggccataacacgtatgacgtagacttgaatgtagtattcaaggggaaagaagacaaaaaaaagataccagaagtagctaatggaattaaagagaagattgagacgcagacggaagaactcaagcgccgttccaaataa

SEQ ID NO: 350 - DNA, 3354 bp, synthetic construct
  source 1..3354: mol_type = other DNA
atgacagacaacactaacaagtattttaagcttaaagaggtggatcacacacaaacgtatgaaacgcagacagattgtcaacgtcacgtcgtgggcgtttacgccaatatcgctcgtcataacatgacactggcagtcaatactgttatgcagagccttggtgaaccattatttgaagaaaacagtatagcagatgccttcaatgatacgcatcgcaaagacattagagattttgaaaacattaagaaactggagctgcaggaacgcttgtaccgtcacttccctttcttgaaacgtatgtacaaagataaggaagtatctctgaaagatctgatggagacgatgagctgttttactcagagcatggctatggtccggaatacatatactcattatcgtccgtttgaatctaatgtcgaggaacagaacgatcttaaaactaaacttggacagtatatggaagacctttttctggagtcaagaaaggtcttcaaaaaagaggagcgcctggacgcctcttccaacgaagtcttgggtagagtgtataagtcgattaaaaatgacaaaggtgagaagtatgttctcgactttaactacccagcgtatatgaagcagggtaaagaaggactcagcgatgtcgggttactctactttctgtgcctgttcttagacaagaaagctgccttcgaccttctcaaccgaaccggctttacgcagcatgcgaagaattattttgacgggaatgaggaacagaccctgttgttactggaaatgatgtgcatgaatcggatccgtatggtacatagccgtattgattctgaaatgtcaaacgaagcattagcgttagacatgttaaacgaactgcgaaagtgcccacgcccattatacgagcaattaggaaaagatgatcgtgattcttttaaggatgtaatgtcaacacagtgggaaaacgaatctccggataatgaagacgcacccattgatgccgaaggcaaaagtatccccaaaactactatggttcgatgggacgatcgatttgcaacgatggccctctcctatatagatacaatgcagtggatggatgacattcgtttccagctcaaacttggtaagtatagatttgcattctacaaccatgacggagaccatatagctggaaatctgttacgagtcttacagaaagaaatgcacggatttggtcgtatccgggaagtagaaaaagagatgaatgaaaaatggggcgccctgtttgaacaaaaatatgaggagaatgggctggagcgcaaagatgcagatcaggcggaccaagctccgtatattactcgccaacgtcctcagtatgcgatagatgacgaaagccatagtatcggaatgcggtgggatttcacgcgtccgaagtattgggattttacgaaacctagttacggggatcttgcaaataagaaaatgtttattccgcatctgccaggcaatccgaaacctgcggaagagggtaaacatcagacaaaccaagctgagcggctgattccgccgcagtgtaccatgagcctctatgaactgccagctttactgttctatgaatatcttcggcggaaacttcgcaatgagacgatggattcagccgagcaaattatcaaacgttattgtaactccttgaagtctttctttggcgacgtatctagaggtaaagtgtttccggatgatgaaaacgagttggccgaagctctgaacaaagattatgggttgagattgtccgatatacccgaacggttgaaaaatgtgctcttaggcaatagtttcgacggtaatgagaagctgaagaagatagttaagaccttcgtggaagaacgtaaaaatgaaattaaagagatgaaaagatgcttagacgagggtattaatcataaactggttaaaaccggtcaagcggcacaatggctggcgcgtgacattatgatatgggtaccgacacagacccgcgagaaactgtcggggcaaaaatattcagccattcaggccaaccttgcgatggttggtaactgggaaggggctgtgagttacggtgatcttcgccagctgttcaccgcagcaggcataattccagaatcaaacctgaaaaaccctaatcagcatcatcctttcctgaaagatgtattaaacggattattaaacgatcgcgagcattcggttaaaagtctgtatcaacggtatcttgacgttgaaagcagccacatatcgtcactcgagttaaaattagcgagaaacaaaaattgcctggattcctttccgtcacttcaccacaatcgtatgcgttggaaacagcaggatgcggccgctttagcgcagtcgtaccttacagtcaaaaataaggcaaaagatagcgagatcattcttaacagcgagaaacctatacaactccccaaaggcatgttcgctgaacgcatcttagccatgatgaaagagttggcgaagaacaatggcgccctgaacgagggtttagaaaaaatcgagaagcaagagaaggggttaaaaggtaataccgcatatctgatcggtttgtatcatacttttgctgaaaatgatgcctctcagccctactacaattatgaacgcgttgttgacgaaggtaaacttgcaaaaagtgaacgtaaacgtatggaacagacgattcgtcgctacaagactcaggatatcttgctcttttacatggctagagaaattctggctttgccggtgggaaatgacaatcggcagcgatttctgttgaagaacgccatgaataatgatctgcttagtttaccgatcgacttctcctggaccgttcgcttaaaagatggctctgcgaaaaccattacccaaaaagcgatgaagatgaaagactatggaaatttccacaaatttgcctcggatggtaaacgtctggcaagtctgctggaacagcaggctgagaccgaatttgcgcgagcagatattgaagcggaactggcgcgctatgaacagagtcgggtggaagtttttagacaagtgtatattctcgaaagccatgccgtaatgaaactgggcgtggcagatgattgtgatatcaaagctcgcgaagatttgttttacgattccgcaaaaggcaaacgttgcaaactgaattcctttaatcaactgatgcaggcactgggaatcggggaaaaggaccgcgaatctcttaccaaaattcgcaatgcctttgcgcacaattactatgtagatctgaaaggcatcggcttttggggctcagttcccaaaattcctaatgtggcatcaaaaacaaaagaatggatggtgcgcaagtgtaatgatctgtatggtccacgttttggcgggtaa

SEQ ID NO: 351 - DNA, 2823 bp, synthetic construct
  source 1..2823: mol_type = other DNA
atggccaaaaaaaagaccgcaaaacaaatccgcgaagaacaaaaagccgcaaagatgcagaaaattcagacctttgtgaaggctaaggaagctaagaaagaaaatgaaaaaaccgcttcagctgttaaacttccggtcaagaaaaatcgtaaaaaatccctggccaaagcctcaggttctaaagccgttctgattgtaggtaacgatattattatgactagttatggtgaacgctgcctggcgaatctggaacataaaattactcccgagctgaacaccgaaagcctgacggttaacaacgttctgaacaacgtcaatgcgaaagatggtaaaaacatctcgtttacagggcgcatatctggtttatccgtctcttcagacaatccactgcattttcatcagactgaagaacgtaaagccccaaaaccagggactgatcttttatgcttaaaagacaaactcgaacagtggtattttgataaaaccttcgacgacaatatacatatacaattgatctaccaaatacaggacatagagaagattcttgcgtcacatgtcaacaatattgtctttgcactggataatattttacacgccacagaaagcgaaacaggcgattttctggggatgggttatatgcgtgcaaccaatacctttgaagagtatagagacagtgcgattagtaacgtcaagaaatcgtatgaaacgttcgagacatacatcaaaaagaaggagttactgtattttggagaagccttttatcatggcaatacgtgtcggaaacccgaagatatctatcacattcttgcaatggtgtcatccttgcgccagttttgttttcatagcactttcgatgataaaagtaagagcattaagggatcttggctgtatcagctggatgaacagctctcagatgaattcaaggagaccctgggtattttatgggctgaggccaccgagaaactcgacagagactttcttaaaacaaatacggtgaacctgcatatcctgtgtgagatctttgataaagagaagcaggaagacatcatcaatgcgtactacgagtttttgatgaagaagtcctttaagaatctcgggttctcagttaagaaactgcgggaatgcatgctcgaggaagcagagttaaacgaattcaaagaagataagtataactcggttcgctcgaaactgtacaagttattcgacttcatcttggtgcatcactataagaatgatagctccccggaatctacagctttgaaaaatttgttacggacctgtctgacggatgaggagaaagaaaaagtgtatgtccagaccgccaaagagttaaccgcgctttattcctatcattttaaagaagcttctgtatctgtgaatgcgcgtaatatcaaagaatatcaggaaaaagctcaagtgtatcacatttcgattgctgataaaattagctctacaggtatagggctgtttagtcagctcatctacatgctcaccttgctgcttgatgggaaagaaattaacgatcttctcacgaccctcatcaacaagttcgacaatataatcggcttcttagacatactggacaaaatgcacctggatactgagttcaaaaaagagtatcagttctttaaccaggagaattgcaagtacacggcgaaagaacttagaaccattaatagcctggcacgtatgcaaaaaccaagcgctaatgcaaaaaaagtaatgtttcgtgatgcgcttagaattttaggcatggataatcgatcagatgaagaaattgataaagaattagatcgaacaatgcctgtaggagcagatggcaagtttattaaaggcaaacagggttttcggaattttattgccagtaatgtcatagaatcatcgcgttttcggtatctggtgcgctacaacaacccgcataaaacgcgtgagttaattcagaaccaacatgttgtgaagttcgtgctggaaggaataccggacacccaaatcaaacggtatttcgaagtctgtaaagataaagatactcctgatacatcttccaaaagtgcccagattgacgttctggcaggtatattgacaaacattgactacaagatatttgaagacgttcctcaaagcgcaaaaatcaataaagacgatgcgtctcgtaatcgtgctgaagcgctgaaaaaacagcgttatcaagcaattgttactctgtatctgacggtgctttatctggtgacgaaaaacctggtgtatgttaacagtcgatatgtaatggcctttcattgtttagaacgcgatgcgctgttatatggcgttgcatttccgccagttgaaaagaaatggggtaaagattattcacagttgacagcgtcattgttaaaagatgagacttacacaacttatggccacctgaaaaatcaaaaaggacatcgaaagtggcacgtgctggtcagccgcaatcttgaaaactccgacaaaaaagctgttcattggttcagaaatattagcgcacacatcagcgtaattcgcaacattaatgaatacatcggcgaggttcaggagtttcactcttactttgagctctaccattaccttgtacaaaaaatgatagcaaaaaataattggtatgatgccaagagtcagcccaagacggccgaatatttggagaatcttgaaaaataccacacatatagtaaagatttcgtaaaagcgtattgcattccgttcggatacgtagtgccgcgttacaagaacttgactatcaatgagttatttgatcgcaacaatcctttgcctgaaccgaaagaagataaagaaaaaaaagaggtttaa

SEQ ID NO: 352 - DNA, 2787 bp, synthetic construct
  source 1..2787: mol_type = other DNA
atgaaaaagcgcttgagtaatccgccagcccgccgccaggattcaaatcccccttctgcctgtaaactttatcttacaagctttggcaaaggaaatgatgcagtgttagaacagcaaattgatacagctgcagactatgccgtgtcaccgatttctgctgaaccatcattgacggtgactgaagcggcagaggcgcgcgtcaagtttgattcgaaacgacctaatgttaaaaaaatccagctcaccgcagacaatcctctccatcattccgcgggaaatccggcgtcaacgcgccgagacattctgggcttaaaaaatgccttagaagaacggttttttggccgcaccttcgatgataccatccatatacagatcatctacaatatactggacatagagaagattctcgccgtttatgcaacaattatatcagcggccctgaaccatctgatggatgagtccagcgatgtgtctcagagtgatgtcattgggaatatagctacccaaaacccttatgccatttttaaagaccctcagtctagatatgattatcgtgatccgtcactgacgccagatcaacgcaaagatgcaaccagaattcgcaaaaagattgacgcaaatcgggcggcctttcaggcactgttagcgacaggccgtctgggctactttgggtttgattataaaccgccgcgtaaagatgagaaagataaaaaaaagattaaagcagcagaaacgcaagagaagagattgtatcatcttgtcgccctcgcgggtcaattacgtcaatggtcttttcatggtggtgataaaccagaggacgaactgtggctgtatcagctggatagccagctggttggcgagcgcaaagagttcctggatacattggactattattacggcgatcgtttcagagagatcaacgacgaattcatcgagcagaacaagatcaatttggctatactcgaagagttgtaccccaaggaagactttcccgagatcgcagccctgtattatgactttattgtagttaagagttacaagaacatgggattctctatcaagaaattacgtgaacagatgactactttagaaggtgcaagcgtgataacagctcagaatatggacagcgtgcggagtaaactttacaaacttatcgacttcagtttattttaccgctactacaaagatgaggctcgccgccaaagagcggtgaatatactgcgcgcaagtaccacagatgaagaaaaagaggctttttatgctgctgaagccgaatggaactggaactattttcgtggtcgttttacggatttttgcctgaaaataggtgattgggtaaagatggatgtggatgcaagccgttggaatgggatattagaccttgatagctatagacgtaccagctccgcgtcttatttttccaaactgttgtacgctatgtcgtttttccttgatggaaaagagatcaacatcttgttcaccacgctcataaacaagttcgaaaacattgcgtcttttatcactacggccaaagaactgagcattgatgtcaccttccacgaaaactatgctttctttaatcaggattgtgacggatatgctcgtgagatcgatgttgtgcgaaatattgcacggatgaaaaaaccagttccaggtgcccgtaaaaccatgtatcgtgatgccttaactgttttaggtattcctgagcacatgcaggcagatatgtttgacgcagaactggagaaaatgttagaaaaaccgaaggacgaaaaagggcggaaacttaaagggaaaaatccctttcgcaatttcatcgcaaataacgttatcgaatccactcgttttatctacgtcgttaagttctgcaacccggataaagttcgatccctggtaaacaacacagttgtgactaagtttgtcctcgggcgtatgccagaaacgcaaattgaccgttattaccaatcttgcattgccaatccggatagcgctgccccgctggctgcgcgtatagatgcgctggccgatatgatgcgtaatatgagatttgaagattttaaagacgtgcagcaaaaatcaggtgatccgattgaaaatatgagaaaagaacgtttcaaagcgattatccgactgtatctggcagtagtctatcagctggtaaaaaaccttgtgaacgttaattctcggtacgttattgcgtttcactgtctggaacgtgattgtcagatctacacgggaaagagtgtctccaagtccaagaaatattttactctgattgacgtgttgctcgaggaaggtgattcgagtcgcagcggatatcttgcccgcaatgtacggatgcgtgaacacattgcacatgatgtagatattggcaaaagtctgattatcactaccaaaagtaccgactcggctacaggtgaagttaagtattcaaaacttcggattatagggttctatcgaaataacattgcgcacttgacagcagttagatcatttgctgactacattggtgatatcgcgcgcattgactcgtattttggcttatatcattatattgtccagcgcttactccagtctcgagattacacagcggaagccttcccagatcggattaatccttactatgcgtcattggacagatatcatacctacgtaaaagatttcgtaaaggccctgaactcacccataggctataatcttcctcggttcaaaaacctgagcattcaacagttatttgaccggaatgaactgcagccggagccgaaagatgacaaagctgaagaatcgtaa

SEQ ID NO: 353 - DNA, 2643 bp, synthetic construct
  source 1..2643: mol_type = other DNA
atggcgaaaaaaaagcgtatgagtgctaaagaacgtaaacaacaacaaattaatctgcgaattaaaaaagccaccgaagattccaccaaaaaagttaacacgacggtcgctgtaaacaataaaccgatttcaaaagagatcaagaaatcgaaagcaaaactggctggtgttaagtgggtgattaaagcgaatgatgatgtcgcttatattagctcttttggtaaaggaaacaatagtgtgcttgaaaaacgtattattggggatgttagttccgatgtgaataaagactctcacatgtatgtgaacccgaagtatacaaagaaaaattatgaaatcaaaaatggattttccagcggaagttctctgacaacgcatccaaataaacccgataaaaactcaggcatggacgctttatgtctgaagacatactttgagaaagagatcttcaaagacaagtttaacgataatatgcacatccaggcaatctataacatctttgatattgaaaaaactttggccaagcacattacaaatataatctatgcggttaattctctggaccgcagttatattcagtcaggaaatgatacaataggttttggtcttaactttaatataccgtatgcagaatatggcggcggtaaagatagcaatggtaaacccgaaaataaaagtgcatgggagaaacgtgaatcctttattaagttttacaacaatgctaaagatcgctttgggtattttgaatctgtattctaccaaaacggtaaacaaattagcgaggagaaattttacatctatctcaacattttaaacttcgtccggaatagtacatttcattataataatacttcaagccatctctacaaagagcggtactgtaaaatcaatcctaagaacaatttgaaaaccgactttgaatttgtaagttaccttaacgagtttgtcaaaaataagttcaagaatgtcaataagaacttcattagcaacgagaaaaacaatctgtacataatcctgaacgcttatggggaagacattgaggatgtagaggtggtaaaaaaatattccaaagaactgtacaaactgtcagttctgaaaactaataaaaacctgggtgtgaatgtcaaaaaattacgcgaatctgcgattgaatatggctattgtccgctgccttatgataaagaaaaggaagtggccaaactttcatccattaagcacaagctttacaagacgtatgattttgtaataactcactatcttaacagcaatgataaacttctcctggagatagtggaagccttgcggttgtcgaaaaatgatgataaaaaggagaatgtgtacaagatctacgccgaaaaaatcttcaaagccgaatacgttattaatcccattaaaaccatctcaaatctctttgcagagaaaggtgataaactgttcaatgagaaagtatcgatttctgaggaatacgtcgaggatatccgtatcgacaagaatatacataattttacaaaggtaatcttctttcttacgtgcttcctggacgggaaggaaataaacgatttgttaaccaacatcatcagcaaactgcaggtgatagaagaccataataatgttatcaaagccatagccaataacaatgacgcggtgtataaagactattcagataagtatgcggttttcaaaaattctggcaaaatagctaccgaattagaagcaattaagagtattgcacgtatggagaataaaattaacaaagcctttaaagaaccattgttaaaagatgcgatgttagcgttaggcgtttcccctaatgatcttgacgagaaatatgaaaaatattttaaaaccgatgttgacgcagacaaagatcaccagaaagtttcgaccttcttaatgaataatgtcattaacaattcgcgcttcaaatatgtggtcaagtatattaacccagcggacataaacagactggcgaaaaacaaacatctggtgaaattcgttctcgatcagatcccgcataaacagattgattcgtactataactcagtgagtacggttgaagaaccaagctataaaggcaaaatacagctgttaactaaaaaaattaccggcctgaacttttattctctctttgagaattgtaaaatacctaatgtggaaaaggagaaaaagaaagccgtgataacactgtattttactatcatctacatcctggtaaaaaatttggttaacattaacggcctgtacacgttagctttatattttgttgaaagagacgggtttttctacaagaaaatctgcgaaaagaaagacaaaaagaagacaaataaagatgttgattatcttctgttgccggaaattttttcaggatctaagtaccgcgaagaaaccaagaacttgaagttaccgaaagaaaaagatagagaaattatgaagaaatatctccctaacgacgaagatcgcaaagagtataataagttctttaaacagtatcgaaacaacattgtccatctgaatattatagcaaaccttagcaaactgactagcaccattgataaggaaattaactcctatttcgaaatttttcattactgcgcacagcgtgtaatgttcgattattgcaaaaataataataaggttgttttataa

SEQ ID NO: 354 - DNA, 3792 bp, synthetic construct
  source 1..3792: mol_type = other DNA
atggcttatgataaacctcgtccgaaacgtcgccaagcgcgctcagatttctacattacagataaggcgattatgggcggctattttaaccttgcccagctgaacttctttaagacattaatggagatcttcaccaaagcagggatcgatgtctctaaaattcggcaggataattcacccaagtatttgatgattctcataaagaaattaagtcaggacgatgaaacgatcgatgacaaaaagtgggcggacgccctcgaccttagtaacgagtgcttactgaaattacagcaactgctgtacaaacatttcccattcttgggacccgtcatgggtggcgaagctagttataacatctacaaactgaaagatgggcacccggaagtaaaagttgcgaatgacgtgatgcgaggagttaaacttgaagattgtctggcggtgctgcggcattttgccctgtgtctgaacgactgcagaaatttttacacccatttcaatccatataactcgatcgatgcgcaaaaagagcagtatttgtcccagaataaagtagcggtttggttagataaggtgaaagatgcctctcggcgtattgtaaaacagaacaatcagctgacctcgcaagacatggaatttttgacgggaatagatcacatgaaaccacaggacaaagttgatgagtttggtaacataatgacagaccgtagaggacgcccgttcaaagaatttgtggagtatgaagattactatttccgtattcgcggtaaacggtacctggttgatgctgcgggcacaaaacttgttgaccaggagcccagaaacgccctttctgattttggtgtcgtgtttctgtgtaccttatttttagagaatgaccagtcacgacgtatgctggacgaactgcggttatttgaaacaggtccgtatgatgggagccgggatggggatgaattcaaaaatgacatactgcgagagattctgctgttttatcgcacgcgcgttccgcggggcaaacgccttgatcctatggatgacactaccttactggctatggatatgctgaacgagttgagaaagtgtcctatgcctctgtatgatgttttaagcagagaaggacagtctttctttgaggatgaggtgaaacgccctaatgattttactccggacgttgctaaacgcttacgctccagcgacagatttccgtatctggcgctgcgttatattgatctcaataagtgcttcgataatatccgttttcaggttcagctgggaaagtttagatataagttttatgacaaaaccacgattgatggtgaacaggtagtacgcggtcttcagaaagaagttaatgcttatggccgcttgcaagatgtagagcgttatcggcaggaaaaatatgccgatatgctgcaacaaactgaattagtagaaacaggagaagaggatataactattgccaattttattccggatactccacagagttctccgtatctgagtgatcggacggcatcgtataacatccataataatcgcataggtctcttttggaatgtgttagacgagcaggaagtgctgacgcgtgaggaaaaaatgtatcttccagacttgaaagtggatgaaaatggaaaggcagatgtatttctgccagcgccgaaagcatccctgagcgttcgtgaccttcctgccctggtcttttatctttatctgcagaatcagcacccagatctgacaccggctgaagcgattatccagcagaaacataatgccttagtccgcttttttgaagatgtttcgacaggccgcctgctgcctgtgaaaggtattgcggagcttaaagccgtgattgatcgctatgagtatcttacgattcacgaaatccctgaaaaattgcgcgattaccttgcaggggctgttggcactgaggatgatgatgattgcgccgatcgcttagattgttatgcgatgggcatcttggaaaaaagataccgtcaagttcgcgcacgcattgatcaactgaaagaagcgcgcaaaatgattggtgataaaatgaaccgttacggtaaaaagagctatatcgatgtgaaacctcggttgctggctgaacaactggcacagagtattgttgattggcagcctgctacagacaatgggagacacaaaatgactggcaaaaatttccagcgtttaatagctttcctcgcgcggtataccgacgaagtacccgggcacgagttaaaagatcttatgagccgcgcccgtctgttggacggcccagtttcccaccccttcctgcagcaagtactggacaagaatccattgaacatcgaagttctgtatgacctgtacttcaaagaggagaagctccatctcgagaactatctggaaatcgaaaccaataaacagggtgaagaagtctttcgtaaaaaagcaagtgtggatctttcgagaatccccttcctcaactcgggccgtctgcgtttccataaacgagactcagcatattatcagcgactggctgcacgttaccttcaagtcgatggtcggcagtccacaatcctgttacctgatggactcttcaccccgcatattctcagcgtgttgaagagcgaataccatgaccttcaggatcatttgcaggatcaagagttaaaccaaaatgcaagctatcttatgtctgtttacttggaacatgttctgcatgactctgctcagccattttatctgtctaactccaatgattccccttttgctagacgttacgacctttttgcaatcttgcaaaataaaaaacgtggcgtagagttattaccttgcccattaacgccagtggagattaatcgacgactgaccggtaaaaccccggatgacaatgcgaaagtgattgaaagagatatcaaagccctcttggacgatatggcacgcaaaacagaagagcggattcgccatcttccccaaggtttttatcgtaaaaaaaagaatcagtctcaagaggaaatggcaaagcttgaacgtcgattaaaacataaaattatcgacgtcaaaaagaacgaacgtacgattcgacggtataagacgcaggatatggctatatttttaatggccaagcagatgctggcaaatcaattaagttggcaaaaccaagaaggggaagtgccgttcaaactggcaaacgtatgtaacgatggttttttgtcacagaccatgaaagtctcctttccgtatgaagttccgctgaaagaagataagaccaagaaggttaccattgacatcgtccaggacaatatgagcttaaaaaactacgggttactctacaagttgtaccacgatgagcgtgtcgtcactctgttacaaaatattgtggaccaacagcagataagctttgctgaattaacggcagaattaagtttgtatgaccagaatcgttctaaggcgttttcaaacttccagcagttcgaaaaactggcgtttgaaacttcaaaagaagccctgactcatccggaacaccggggctttttccttgaaaaagtgaataaaaaaaatcaggtcattcgttacgagcgccgtaacaattttgatgccctcttagatctgctggatgccattgaggcccatcaattagatccgcgtgaacgtcagtggctcacaagtgtgcgtaacgcattttgccacaattcatactacaagatcgacatgcaacagatagaaaagaagctccccactattatacaacaaatagtagaaatagtccagcgtattaccgataaagcatcacatccgtcaaacagataa

SEQ ID NO: 355 - DNA, 3189 bp, synthetic construct
  source 1..3189: mol_type = other DNA
atggcgcgcaaactgttttccaatgaaacccggccgcatcttgccgcttatttcaatatggcttgccataatgcgtttgtagttttgagcagaataagtgaaaaagcgtcgaaaagttgcgaccagcggttagagatgaaactgagtgagctgcccgtcatttcactgtttgatacaaagaagcccgaggaaaaagagtggatcatgaaccgtttcgagaagtcttttccgtttatttccccagcaatgaaaatgaataaaatcagcgaagcaggctatgatgatcttcagtgttcctcacggccgtatgtgcggacgacgtacgcgatgaaaaaatgcatcgttgacattttcaatatgctcaatttctttagagacaagtatacacactacgtctttaatgatgagcgaaacgataacgcggaatatagagatatccagaaacgtgtagtggaataccttgaggcttgctttactgcgtcatgccgcatcgtgaaggaacgctttctgctggataaagaattggaattcttaacaaaaggtcggtacgagagacacggtgccaagtgtgtggtgaatacacgtagcccctttgctttacgggacgaacaaggtatgctctcagatatggggatactgtatttcctctgtctcttcattgagaagcagtacgttagtatgctgttcgatcagttgggttacaaaggttatgccatctatgagaaccattcagaactgcgtagaaagtacatacgtgagattttcagcgtctatcgcattaaactgccgcgcgaacgtattgtttctgaaagcgctatcgaggcactgggtatggacatgctgggggatctgaaacgctgtcctgaggtcttattcaaaacgattagtgctaatgaccaggcgaagtttagaattaaagccgaaacatctggtgaagaaaccttattcattcgaaaagattctcggtttgcacgattggcgttgcaatacatcgacgaaaaggagcattttaaaaatatacgttttcatgtgtcattgggcgaatatcgttataagttctacgaaaaaagatgtatcgatggggatacgcgcgttcggatcttacagaaagaccttaatggctttggccgccttgccgagattgaaaaactgcgtaccgagcggtgggggaaatatattcgtccttttgaaagcattcgcatagatgatgttcatacccggccatatattacggatcaacgtgctaagtatctttttaacggtaaccgaataggtctgtgttttaacacaaaagatgcacaggtcatgtctgccggagtgtatatgccagcaattgacggcgacaatgcaccttgcgtccagccgacctgttggctgagtgtttatgagattcccgccatgatttttcacttgttactgtgtaaggaagatgacgcattggaaaatacacgaggcagcgatacggagtcaataatcaaaaactacgtggcgaattacaaacgtttctttgacgattgggcgaaaggacggtggcgtcggagcggggatgcggctaaagattttgctgacatagaaacggagtattcgattaaacaacgtgatcttccgcagaaagtttgtgattatattactggggtaaaaggaaaaccactgcaagaaaaagcttccgcgatcgtcaaagcgatgcgggccgaaaacgaagaaatgatccgtcgttttgatgaacgctacgcacgtgcaattagcccggataataagtttggaaaacgttcttttattgaaatccaacctggacgtctggctgcctttttagccgaagatatagttcgctttaccccgtcagttgatggtaaagataaacccacgggcaaaaatttttcggttttacagtcagctatagcaatctactcgttgcggaaaggatatgatatgttggatgagctgcgtcgaatctttctctccgctgggattattggacagagacagggtaaaaaccatccttttctggacaaggtgttagcggatgaacctcaagacaccatgcaactgtatcgtgcttatcttgtgcaacgtgatgtgtatcttagacgtgttaacgccaccaaaacctatacttcagcgtattttatccatacaactcgcgctaagtgggctaaacgcacagacgaatattacaactctctggcaaagagatatctgagccagccgatagaactgccacgccgcctgtttgaagacgatattaaacgtcgattaatcaagcgtcatccggatatggcagcatgcttgcagcaagaacgctgcaatgtagcctatatgattaactgctatatgcagcaggtagagcacgacggcgttcagtctttttatgcgatgcctcgtcgctatagctgctttgcagatgatacgtatcgaactgtcgatgagatgcagagctactcccatatagaccttctgtctcattatcttcgcgagtgtaaaaataacgcgtcggaagaggccccgtacatcgaagccgacgcacgtcgccgctttcacgcactgtacaaaaaatatgatgataatgaacgtgtcattcgccgctatatggttcaggatattttactcttccttatggccagagacttgctgattaaaataaagaccgataagaagagttttgaggaatacagactccagaaagttaccccagaaggtgagggtatactggaatataaagtaccggattttgcagtgacattaactttcgccaacggcgagaaacgtaccatccgccaacacaatctcaaagtaaaaaattatggagatttcttcaagttcatgtatgatgaacgagtgaaaactctgctgccacaggttaaaagtttggaaatcgatcgggaagtgctggaacaagaactgcaacactacgactcctctcggcctgacgtcttccgcttaatattaaaacttgagcagttcattgttgagcacttctccgaactcaaacagcaacgtgtgcagtttcgtgacattttagataaagtaactttaaacaccgcggacaaggaagtgctccgccttttacgtaatgcctttagtcataataagtacccacgcctgagtcagattgaagaatatgccctgccgggcgtagcagtttcgttacagcatattgcagaggaattagtaactaaagccggcagataa

SEQ ID NO: 356 - DNA, 3438 bp, synthetic construct
  source 1..3438: mol_type = other DNA
atggctcatagacagcaatggaataaaaataaagcgtctgatggtaaaaaaccgcgaaaagctagctggcagtggaagcagtccatgacgactgaaatgaagcccgtgatggcgtcttaccttaatatggcccgccataatgtgtatcgtactttaattcatatttctacccaaatgcaaattgcagagcaaggtgatgaagataaacttgcaaagttcgagatatggaaaaaactggagaaagccccggcccctgaacagatgaaattgataaagctgttgcagaaacactttcctgttctccaagcattttttaactacgagaagaaagccggcaaggtaatggtggatactagcgcgcatgatgtccgtcatttcttcgtcaaacagctgctcccgacactgtcgcgcatacgtaatgaatatacccattacgcagcgaaacctcgaacacaaaaagaggaaggtgaattacgaccataccttcggcaagcactggccgatagtgttcccgccgtgttcgatcggtttgcggttgaagtcgtagaagataacaagtgtaaaaaaaagaaaccgactcagccaaaagtagtttcggaagcggttaaaaaaatttttccagaacctttcgacaaaaagggtaataaaaagagtatctataaccttgtatctggcgacgcctttagtgatctcggaatcgtcttctttacatgcttatttctggaacggcgttatactgcgatgttcctggatgcattgaaaccttggccagagtcctttaatgaggtgcagcgtaaagcagtgtttgaagtttttacgtacgatcatattcggttaccgcgtgagaagtatgattctgtaaccccggactatgctctcggtctggaaatgctgaacgaactgcaaaaatgtcctgctgaactgtttgatatcctgtcctcaaaagatcaggaacggctgtcagtggatattaagagtgatgatccggacgtagtgacggacgatggagttaccgtcaaaggcggaaaagttcagatgaaacgtgtctccgaccgcttcgcacgtatggcaatgatgtatattgaccgcactaatgcattcaaaaatcttcgttttatggtgcatctgggcaattatcgttttaagttttacatgaaacagtgcgttgctgataaggaagctgatacactgcgaactcttcagaaggaaatcaatggttttggacgaatagacgaaattgaagccgcccgtagacagatgtatgcgccaatgtttaaagcgacggttaagaaggagaacgcggccggggtcgaggttgaagaattacaaccggatcatgcgggcatgaaaccctatatgacggacacaaaagctaactatgtctttgataataaccgcattggtctgcgtgctattggcggggatcgcgaaccacgcctgtatctgccgtctttgacggaaaatggtgagcccattgatgatgcaaaacaggttaaactttacaccccaaatgcttggttgagcgtatacgagttgccgggcctcatattctacaaattattatgtgacacatatcccgagcaagcagagaagttaggcgatgcagaggaagtcattaaaagctacataaacgcttacagaaaactgtttaagaatatcagagatgacaagttcgacggatgggatgagaaacgctattcaccactgacgttggaagatcttcccgtcaaaatcaaaacgtatattctgaaacctgaagcctcggtcaatccgctctttgcaaagaaagcacagatagtgattaaggaaatggtggaagcgacagaaaaagagattgaacggttcaatcgcaaacttgatcggttaacagaccgggaagttcgcccggataaaaaaacagaccttcgtccgggggctattgcaactcgacttagccgcgatataatgtattttgcacctaagagtgaagcaaaagataagatgacaagcgcgaatttcaatagtctgcagtccgcgctggcgttgtcgaagtattccgtaaaacgaatgcgtggtatggtggatgaactcgggcacccgtttattggcgaagcatttgacaattatgccgctaccaactttaagatctatgatttttacaaaatctaccttgagtcccggttaaagtatttgaagtcaaaacagggtctgggtaaagctgaattggagaagttacctttcctgcacccggaccgtgccaagtggcagaaacgcgataaaaaaggaatccaggaactcgcggggcgttatcttaaaattggggaagttgattttccacatgggtttgagttaccgcgcggattgttcacagccagagctgaagctattatgagagaggcaggtgtgttgactgaaccggctggtgatcgtaaaccgtcaatgaccaatcttatcaatcattactttgaacacgttttagaagacgataaccagcccttttattgctggtctaaacactatgaagtttttgacagactcgccgctaaaaaagatgacaaacatcctaccccacagttcttaagcccaactcagttgtgtgaaaaaatgaaagttcgcaaacgccttagaccatcaaagttcatgttaaacaaggccctggaatcggtcaataacggcctgcctgatgaggagcatatcaaggatatctatgactatcgtattacctcactggccaaagaacgtctgaaaaaagactatgccgagtatgatgataatgaacgcatgctgcggagatttgcggtgcaggataaactgatatttctgatggccaaggatatcttgctgggtgttgggggaattaaaaaagaagcactgggtaagtttaaactgaaagatgttatgccgggcgcaaaagatagcattctggaaaccacagtgcccttcattatcaccttaacggtaggagacactattttaaccatccgccagaaagaggagattaaaattaagcgttatggcgaattctaccgctataacagtgaaccgcggctcaaatctttattaccttacctgactaaaaaaattggcggaaacgctgatgccaaactggaaatcgaccgtgaggagttagaagatgaactgagccgttatgaccttaaacgggtggacgtaatgtcaatggtacagacctttgaaaaaggtattatcaaacaagcgggcaaggccggtataagaatcgacgatgacacgctgatcaactttaacaacctgataaccaaaattgggcacgtgccgtatgagggccaagggaaaatcttgatcaacatacgtaatggtttctgccacaatgagtacgcgaaagacatatctatacctgaagagacgtcactccccgaaattgcggaacaaattagtacgctttttgataccacccgcaaacgtccaaccacaaaagagtaa

SEQ ID NO: 357 - DNA, 3573 bp, synthetic construct
  source 1..3573: mol_type = other DNA
atggaaaccacgattaataaccgaatcggaaaaggtgaatactataccgaagaaagtaaagagttcttagccgcctacttcaatcaggccattcacaacgtgtttattgttctgaatcacattgcaaaaagatttggcatggacgagttatcaagcgatgaggagctgaaaaactggctgattggcagacagcgggaaaaaaaacgtaatgcgatcgatagacagcgttttcttgaattaatcgatcgccattttccttttttgcgaattgcgaatgccgataaaaaagatgcaaaacgcgagaatgatcttgaagacaatctggcgctgctcataaccttattgaacgacctgacggaacgtcgtaataagtactcacacgccataactcatgcgagtattgaaagtaatgaccgcgagttagtttggcgcttatattcaatctacgatgccaatattaatttggttaagcgcgactattttgagtcaaacgtgcatacggaaattaatgaagatccgtacgaaaaacaagtcgagcacctgcgtcgtttctgtatgaataacgatcgtacaaaagtcgatgaaaagggaaagaaaaagcctgcgatgccgaatccacgttttcgtacgccctttcttaacgcagaaactaaccagctgagtatctacggcctggtgttcttcgtatcgctctttctggaaaagaagtacgccatccagatgcagaaaaatgtgtatggcctgaaagatgctcgcgacacgaagtttaaaatgaccaatgaagtattttgtcgttcgcgtatcatcatgccgcgagtgcgcctgcactcagacaaaagtaccgacgctctggtgctggacatgctgaacgaactggccaaagcaccagaagtactgtttgatcaattgactgatccgttcaaggagaagttctacatagaaagcatcgattccttagaggagagcgacattatcaccccggtgcgcgctattcggaaacaaaaccggtttatgtattttgctttacgatatctcgacgagtctaatgccttcagcaaacttagattccagattgatctgggtaattatcattaccatctttatgagagcaaaattaacgatcagacagaaagcagacaccttacaagaaaactttttgggtttggtaaacttattgcctttgaacaagaatttgcgcccgaggaatggaaaatgaaatcaaaagatctggactattatgaaggcgccacccagccgtttattgctaaaacctatccccactatcatttggaagaaaacaagattggcattttgttcaatggacaggccgaagttcaatggccgcatcttgatgttgaagaacacgaaagctttcctaagtataaacgacgcgcaaatgagaaagcagatgcgtttttaagtgggaacgaactgctggctgcggcgttttgtcatcatttgtatgcgtcgattggtaaacctaataccgtggaaaaaatcattcgcgataagtaccatgctttacggcagctgttttcagatttgaaatctggcaatcttcagaatctgttaggtgacaatacctctaatgaggcgatttcccagctcctgtttgaaaagtaccgtttgacattatcggaagtgccagtacgcctgcatgcattcttgagcggtcaggagcaggctgatactaaggcgatagcgcgcgggaaacttgaacttatggcccagcagaacaaaaaacgtatagagcggttcgacgcaatgaaaaaagcagtggttaaagtcggaaaggctcagtatcgcacgttacgttctggtgatataggcgattggctggtccgcgacttcatgcggttccagccgattgggtataagcgtaaccaagctggcaaacaagaaccggatctgaaaagcaaagcgaatccaaaaaagtatcaattaatccagaaaagcctggctttgtatgagcaagaaaaaaacaacttgttagggctgttcaaatcatgcaatcttctgtcttcggagaatgaacatccgtttttaaacgaggttgttcaaagcatgcctgcaacttggcaggacttttatgagcgttatctgcatgcgcggtctcggttcctggaaaaatgtatcgagaaaggtattaaaaagaattcctatcaagcctgctattcttttttgaagatcaaaccccagctcaaagataaggaaaaattgtatcaaggatgggacgcccagatgaacctgccaacaaacatgttcatcgatgcgatccatgattggtttcgtcaaacacatcatgaatccttacgcacatggtttacacagcaggaaaaaccccaccaattgataggcctgattagaaagtatatcgaactggctcatacagatcaaattcagggattctatgatatgtttcctttacgttacgacttttacaaaaaggaatttccgaacggtttagtactccacgagcgcattaataaacagaaacagatttgggaagcccagttaattcagaccaaaaaaagactcgaggatgcggcttccaaacttaaaaaagttaaacagcaggtcgagagcttgccggatcaggaactcagattccgcaatgaaacagaggccatggtttattttacaaaactgtttgactcctctattgtaaagaatgccatcttaaaacttcagcgtgaccagaaagctttacgggtaaacaccattggcgaaaagattatcaaaatctacacagcaaagtatgatgcaatccatcaagaggtgagagactttaaaagtatgttaacgactgaaaaaatgatacggcgagttaaagcggaagattgcgtcaccctcttcatgttaactgatcttatgaatcagtctcagattaccattggacaggaacaacgtactattaaactgtctgatattcagccaatgggtgaaactcagattcaaggtattttagatgcagtccaggtactcgaacaaaagttggattttttttcctcagatgaacaggggaaaatctcccaagtaaaactcggtgagtggacgatcttctcaacggatacgaaagttaagaagcagggtaactttaaacaactcctcaaagatcgacgtttaaacaatctggcacactatattctgccagatatagccggtggggctatacgggttcgccgtaatctgctggaaatggagctggatcaatatgaccgcaatcgtatacccatcataaaacttatgtatgagcttgagtacgcaatatacaaagtggacccattctctgttgagttaaaatataagaaattttcacaatgtttacgcgaatacgcgcagaaggcagtgctgaacgttgaacaggtcgagcatctgaatgttttaatcgcaattcggaacgctattatgcacaaccaatatccgaatcgtgatcatcttaaagcaatagtcccttttactgtaagtgaatatgcacctgtccaagaaggcctgaccatagctcgtcagctgctggcctgcgcacaggtgtcggtgaatataatcctgagtactataagtaagttcgaataa

SEQ ID NO: 358 - DNA, 2961 bp, synthetic construct
  source 1..2961: mol_type = other DNA
atgaatgaaattaaacagccgaataattcaaagtatgtttatgcaccgtaccttactatggctgcctgtaatatagatgctgtcttttatcacttggaagatattttcaaccataaacagaacaacgcgatagagattgatgatggcataacacagctttacaaattaaaaatattccaggatctgggtatctctaatggaagcaacgatgagaatactcctgttgattttctgagaaaagatgcaattatcaaacagatttgtcgtaacatcccgttttttaacatcctgttcgactccaaaatctttagcaacaaaagtttagatgaacgctgtcgctgcgtagatcgatatattcgcgccctgtttgacatgcgcaattattatagccatgtgctgcacgaagagatcgatattactcatcaaatccccaacatagaaaacgacttgaattacatttttgaagagaatcgtaatacggttaaaaagcggtttgtcttaaacgacgatgatattaaacaccttaaagtgtttcataaagacaaaaaagggagtaattcgtactataagtttctggaatccggagaccattgtgataaactcaccgtcaatgggctgctgtttttcacgtgcatgttcctggaaaaaagatacgcgtacgaattgctcaagaaacactacgggtttaaaaactcatctagtaaaatgcataaagcgaccttggagacctttacagtgacgtgtattcgcctgcctcataataaacttgaagtttcggattcaaaagtgacgctgggtctggatattgccaacgaaatttgcaaatgccctgacgaaattttttcactgttgagtattaaagatcgcaataagttccgtattcctattgataaaactgatcccgaacaaaatattaacgaagattgcgaagacaatgatacccaaacgattctgcaaaaacgctattctaatcgttttccttattttgccctgcgttatcttgaattcatgaatcatctgccggacatctatttccacattgatatgggtacatacttttatgactgttacaaaaaacagcttattgataacagtgaaatcaaagatcgaagattatcaaaaaacatcctgtgtttcgataaaatggacaatgcggtgaaaacctttaatgattcaaagaattcaggcttatatgccgccaagtacgatgaaaagaacgaatatcgtaacaacacgttcccacactatcatatcaacaacaatcagattgggatatccctggaaaagtatatacctgaactgcggggaaaagatacccgcttacgtaaaccagatgcgttattaagcatctacgagttaccactgattgtctacctgtgcctgaacaataaaggtgaggatgttacggaattgataaaaaaccatatcaatacttctaaactcttctttgagtatgtggcatcgggcggcagatatagtatcgacaatgagaatatgattatttttaatgcggggaataagattaattctcatcatttgccggagttatttcgcaaagataaactgaattataaagatctggcaagcaaagccctcaaaaatcaacgtgagaaagctcagaatataatagaccggtattacaccactaaggatcgcaaaggaaagatactgaaaaacaaacgtagtttaaaaacaggccatatcgctgatattcttatggaagatcttatgcgctttcagccaagcatcgaatatacagcaggaaaagataaagtttcatccccaaattatcaggcactgcagaaagcatttgcatatatcggttcgcgttatatggaaattcctaatttgctgagaaaagcacgtttaactcattctgaaaatagccaccccttcatagataagtgcatctctccaatgccgaagaacatcaacggtttcttcaagcgttatttggaagagaaaattaagtacattgatacaatcgtagcaaaaggtgactttaccaatgcttactttttacgtgactatattaaaaaatatggcgctgatcttgaaaccgagcgtcgtaatgcggcgcataatcttatagataaaccggccgatatcccacggggcatttttaaagatcttttttcaacagaatatgcttctcccacctatcacatctacaaagaattactcgagaatgaggacgatgttcaggatttttatcatttgaaactcaattttccggagtacattaacgacaagcaaaagtataaagtttatcagaagattaacttcattcgagcttgtgacattgtaagcttttacatgatgaaagatctgatcggtatcgataatagcagcgtgaaacttatgagctctggcggcgacaaacatatattaaacttaagtcagaatgtcgatattccggtaatgctgctgagaacgattggtaaaggtaagaacacaaagactaaaattaatgagcaaatcatctccggaaagattaaaataaaggactatggcaaattccgacgtttgatattcgacaaacggctcttttcatactcgctgtattttaataaaaacgaagaagggtcggaaaaggataagttgatatttgacgacattgagtttgaattcaccgagtatgacaaatcgcggctgaagatattcgaactgatccacaaatttgaggaacgggttataattaaaaatgccattgccttaccggtgcccagcaattccgacgataaaaaaaacaagaaatacagttacatcagtttcccggatatcctgaaaaaatccggtcttaataaagaaaatatggagctcctcaaaaatattcgcaacgcgttttctcatcacgaatattatgtcgtaaaagaccttaacgcgaacaagcgagagatcaccaagaagttatatgacaagtgtgaaaaggatattatttgcataacaaattccatataa

SEQ ID NO: 359 - DNA, 3576 bp, synthetic construct
  source 1..3576: mol_type = other DNA
atgctgatcataaaaccgtacggacgcagccagacccaacatgcttcggactcacagcgcaatcgcctgcatcttccatcagggcaggcccatgctgaggcggtcgaacagttgcagaataaccttgactttgtgatggctcagtggattagcgttattgataaaattatacgcaaacaaccacagcgtagcggaaagggcgacaaaaaaatcgcagccccacaggtttctacaacccagttcaatgcccgcaaagccttaggcatggctgccctgcagtgcatcgaaaaagaattttctgagttaagcgaccttcaaaagaagcaatggggttggaaagtccatccctacgattgtactaatcttgttgagcctcaaccgaaagatcgcattactggccgttggtacagccgttttgtgggagccattcatccgcaagatatcacgcaacaaaccgttccggcaattgtgcagaaaatccatgatcatctgtatcagcaggcgctgcgtccaaatgcatccacggccgtgcatacccagggtcacactacccatcagctccatacaatagctagaaacgtgcatgctttaaaaacgccgaaagcgtctacccacgtgagttcagattcggcatggcagagttatttcctgtctaatgatgtagtggcctgcatctacaaagagcttcaggacaagcatgatcagaaggacaagacgaaacatcagagccagcctaaaccgctgattccgacaacgactccaaaagccccgttattttccgaccgggcgactattgcccagcatctgtttaaccactatgccaaagtgttcgcaacacctagtgggacccctactccagtgaaagatcttttaaacgaagcgcatccattgcatgcacaatggctggtgcatcagtgcattaaagccacctataaggcattgtttgataatgcgtcaatcaaaggcctgaagcacatacaacataagctcccagccaattctgaagccatgagacagcttattgaaaaccgtcgtaaaaatcatgatattggacacctggtacgactcgggaaagtactgcattatgaagctgccgaacgtggacaactcccgcgggcttgctggggcgagatttctacacctgctgtcgcagagggttcagcatattggctgtcagagggccaagcagaaatcaaacgaagcgaagctttggtgcgcagcttcaaacaggcaatcactcacgctggtcatacattgtcccagctgtcagattggtccggtaacggcgatatttttctgaacgcttccgaagctgcgaagcaggcagatgcaaaaaccgtcgaacagcgtgtagccttattatttgggagagcatgttcagacctttttccctcgtgttatgcgccgtctgggaatctgcaggccgcaattcaagccctgctggcgcagagcatcgaagcctgggctcagttacgtcatgccagttttcacttcaaaggtaaacacgtgttcctcgaaaaactgcagaattccttggcgaagaacaatgtatctaccccggaattagatgcggtggcccagaaactgtgggaacaagacggagaacagagacagaaacgcatacgagcaagtttagaggctgcgcattgtctggatcatctgagccaggctcagctgaacgcagtttatctttgcatcgcaggcgataagcaaactagaatcggtagttcgttagatatgccccggttgaaccgcgttttaaaccgggcgcaaaatacaaaacttggtatgaaaccgctcaccgacggtgccccgacattacagttatcaacgcctgctaagcgccaaaccctggaaaactctcccgcccagcgatgtcggtatgtgctgctgaaattactgtatgagcaggacttcgcggcttggctccaggatacacgccaggaaacaattgataagtggataggtggagcgatcgcgcgtaacacaaaggcagccagagaactgaacggaaaaggcttgcagcctcagaccaccatacacgctaaggcggaacggctgtggcatgagcaagcgcaggcaccgacagctaaaagtacatctcaggccaatccaattgctcggttttttcacgatctggccgcagcaacggcatcagagtttcgtgtccagcgacactatgccagtgacggtgaacaagctcaagcgcaagcggcttatattgatgatttgaaatgcgacgtagtcgcgcgcgcattcttgacgtatcttaaaaataagtggccatggttgttacaggatcttgcggttcaaaatacgccctcttgcatggatgcactgcccgcggatgcccatgaagccttgcagctggacaatctttggcaacaacgtttatactttttgttacacatggttccggtcggtgtggtctcccagctgttacatcaactccgtaagtggcaggttctctccactcaggcggaagcgtcgaaaactgccgttgaagaccaagcactgtacacacattgtctgcaggtaatggtgctttatctggatatgcatgatgctaagttcgatggcgggacggcaatacacctggacgatactcatcgccagcccttaaaagattgcttcaaacgcgttgaggattttgccgcgtgtctccctgcctctgcaaatccttcacaaccgggagatgcgcacataccgttgcgtggcctgcgtgaaatgctgcgctttgggggtgcaaaagtcttagcacctgtatttcgtcaacatccaatttcggcggctgaatatgcagactggcaaaaattacaggctgtaattaaagaggcccaaaaaacacgtgaggatcttcatgctgagtgggtaaaaaatcggaaaggctttaccggccagcaggcttacgcgcaggccctcgagacgtgtatgtcgcatagacatcttgcacatagagtccggttagttgaccatctgcaactgcattcgctcctcatggccgtcttggcgcggctggcagattacgcgggactgtgggaacgagacctttactttgtatccttagctctgtgttatcacgaaggtctggatccggcccaagttttcaatgagagcgggaatcacggtaactattttgatggtggtcagatcgttgaagccttacgcaacgaatctagccccagtaagagtattcaaactcaagttgctatgctgttcggtactgattgcaaaaaaggggatccgatggtcaatattcgtaatgcactgtcacattttaacatgctgcgtcataccaaacaccagactgcacctgcgccaattgatcttacgcactgggtgaatcagacccgcagactgttggcacacgaccgtaaactgaaaaacgcagttagtaagagcatcatggagcttctggagcgtgaaggcttagttttgacctggcaaaccaatcaccagcaccagttagaattgagcaaggttgacagtaaaaaaattgcgcaccttggggctaaacagggcacggaacctcaccattccggcgcgtattgtgcgatggttcgtcagatattttaa

SEQ ID NO: 360 - DNA, 3510 bp, synthetic construct
  source 1..3510: mol_type = other DNA
atgttagtgattaagccctatggtagaaccactactacggttgaatccaatgcacagcgtaaactgaatcgtaaacaaaccccgtggcgggcagacgacgttggcactttgaaccaggagcatgatttcctgatagctcactggatttctatgatagacaagattatttgcaaacctaaggccatcaaagcagcagagggccaagaacgcaagcgctcgcagccgggaaaggcgacaacgctgcagagagacgttcggcagttaataggtgacgccgcgctggatttttttaatccgaaaccaaatagagaaatctggcagtggaagctccatccctatgaggttggtgatgctcccacaggccaggccgctcctaatattaaaggccgcttttacaaagcttttgtcggccatggtgtggaaccgcaccaaatcgatgcaacgcaggcgaaagcaatcaccgaaaaaatacgtgctcaccttatgacagcggccttaaagcagcaaggcaataatccccagtcagcgcaaagcgagtcgcgtttaggtcgtattgctcaccagctgggaaccatcactcagaacgttcaccataaaaaagatcttgaaccacatgcgttggacgaggccgcttggcagacgtattttcagaaaggggatgtcatagaacaaatagctaaagctcttgccgctaagtataataaaagtgataaaagtaaacagcccgcacagccaaccctgacggatcgagctacaattgcgaagtttctgtttgagcattacgcattggtgtttgggaagactacccaagttcgcgatctcgttagagaagaacacccactccataaacagtggcaggtccaccagcgtatcaaagccacatacaaggccatgtttgacaatgccagtatgaaagggctgaaagggatccataaacgtgttccgaaagacaaaaaggagatgtggggccgcatccatcagcgtgccaataatcaaagcgtagcccacctggtgcggttaggcaaagttattcactaccaagcagcggaagaatgtaaaactgtgcgtgccgcatggcatactttacagacaactctggacgcatccccgtattggttaagcgacggccaagccgagatcaaacgttcagaagcgctggttagagtttttaaacttgcggtaagtcatgcgggtcgatccctgtcggaccttacccaatgggaaggtggagatattttcgataacgaagacaaagcctcaaaaggagccgtcgcgcaggaattcggtgaacggatgaaaacaatttttggtaacgacaaagaaagcgtcttcccatctgtttgggccactgacgatgcattgagcgaagaagccagacagttgctggaacaaactattcaagcttgggcgcagttacgacatgccagcttccattttaaagggcgcgatgggtttttgaacgaactgaaacgctcattatcatctgaaccgcatacgctggcgtacccggcgcttgatcagttatcgaaaaaactgtgggatgaggacattattacgcggaaagaacgcattaaaaaaacgctcgaagccgcacattgtgaaacacatctggcccagcatcagctggaaagtgtttataagacgatttgtggagaaaacgtgacccgttatggatccaccttggatcttccgcgtctcaaccgtgtactgaaccgtgctcggaatgcggaccttaaagtcgatacaaccaatgctcaggtcagtctccctatgcctgcaaaaaacgaagtactggagaaatccccttctgctcgttgccagtacgtgctcctcaaaatgctgtacgagcaaggtttctcgtcttggatgcaagagaaaaatctgtacgaggtggataagtggatagtgcgcgcaattgagcgctccaacatcgcggctcacgcgattaatggatcaaacaaaaacaataagcaacctattgaaagcatccaagcacgcgccacgcgtctgtggcagtcaatcggtcaaaaaactggtcacgatttttccaacgatctgttggatggaaagagtcccattgcttactttttccaccagttagcggcagctactgctacagaatttcgtgtgcagcgattttatgaatcaaacggggaagcagcgcaagaacaagcggcgtttattgacgatttgaaatgcgatgttgtggcgatagcatttgctaagtatctggggtctaagttcagttggctgttacagggtttagacggtacccagacctgtagcatcaacgatcttcaaaaagcgactaccaccgcctcggtagaaatatggcagcagcgtctgtattatcttatccattttgtaccggtaggcgttgtgtcacgattactgcatcagctgcggaagtggcatatattaaccgcgaaaggaaaagatcgcgcacctacaccggataatctttacgcgcagtgtgcacaagtgctggtactgtatttggacatgcacgatgctaagttcgatgggggcaccgcacatcagctggatgatgatcttctcaagaaactgaaaagttgctttgaatccgaagccgactttgcaacgctctttccgcaaggtgcagaggccgattctcgtatcccactgcgttcattacgtgaaatgctgcggttcggcgctctggacacattggcgccactctttgaaaaacatcctattacacatgctgagtatgagcgatggcaggcattacagggccagattgatgatgcgcaaaatcttcgggccgagctgcatagccagtgggtagaacacaaacgtaatttcgatcaggtactgcaatatcaggccgccttaaagatttgcgaggcacatcggcatttggcccatcgcgtccgtttaatcgatcatgttcagttacataatcttatgatggcagtgttagcacgcttagttgattatgcaggtctgtgggaaagagatctgtatttcgtcacgttggccttgtgccaccatcaccagatcgacctgaatagtctgttcgcccacacagataaacatggtaactgcttctttgataacggacagattgtgaaagcattgcgcaaggctgagtctgatgaatgttttacgaaagtacataccacattatctgcgttatttggagaaacctatctgggcggcgagttaaacggccttcgcaaccgcttctctcactttaatatgctgcagaagaaagagagcgcgtcaattaatctgaccaacgaagtcaatgaggcacgagccctgatggtctatgatcggaaactcaagaattctgtggctaaaagtatcttagagttaatagaaagagaagggttcaagcttagctggaaaacaaataatgagcatcttctggaaagagcgtccatacaaactaaacgcattacccaccttggtaataaagccgaggaagctcatcatagctcgaattattgtactatggttgcacacttgtttggtacgacgtaa

SEQ ID NO: 361 - DNA, 3585 bp, synthetic construct
  source 1..3585: mol_type = other DNA
atgttaattattaaaccttatgggagaacacgtacagaagataatgagtcaagcggacgccagcggaaacttgtaggtaaacagatccagttacaaagtgagccagttactgtaatcgccgagaagaatgaattcctgatggcgcaatggatatcaatcatcgacaagatcataagtaagagtccggtcaaacgaattattgaaggtaagatcaaaccatgcattgcacctacccagcgacaggcacgcgaacggattggtcaggcggcaatcaagtttcagcccgccttaaaggaactggaagccaattggaaagctaaaatccatgcttataagataactcgtacagttagtagcggggatcccaaagatcgcattaagggacgatcctatgccaagtttgtgccccatggaatcgaaccggagcagataacaacccaaattgcagaagagatcgccaagaaaattcatgatcatcttaatcaccacgcgctgaactctaaggggaccgggggtaaaggaaaaggatccatcgcgcaccaactgggcagcatagcacaaaatgtccaccaggcggataaagaaagcggtcaggagccgtcagaggtggaatggcagaaatacttcgatcatcacgatgtagttgcggcaattgctaaagctattcagagcaatagaccggcacgtaccaaacctacgttaactccgaaagaaactgctaataccggccagtccccttctgattctccacgccgcctgacagatacggcaacgattgctaaacatcttttcgaccattttggccaagtttttggtcagaacgcaaaagttaaagacctgctcaaaccgagccacccgcagcacgggctgtggcaagtccatcatcgcatcaaagcaacttacaaggctctgtttgacaacgcctctgtaaagcgccgaaaaaatatggcgatacacatgcctttaaacaaagaagccatgatggcgctggtgcggcatcgcacatcaaatcaggaccttaaccagttagtgcgtctcggtaaagtgatccattacgaagctgcggcatgtggtcaatcggtccgttcggcatggtctaatattcgccctaatattgacaaaagtccttattggctgtcggaaggccaaagcgaaattaaacggagtgaagccttggttagagtctttaaactgagcgtatctcacgcctctagaaccttaacggatctttgtcaatggcaagagggcgatatctttctgaacagcgaggatgcatccaaaaaactgattcccgatcggtttgtgcaacgtatgcaaacgttgtttggacgagatcaagacgcgagtgatcctgtgataccatctgcctggcattcgaatgggcaactgcacgacgatgcacaagccttgttaaaagagactattgatgcatgggcgcaactgcgtcacgcttcgtttcattttaaaggacgcaacggctttttaacgcaactgacccagggtttgagtcggcatgctggcagctccccgccgtccaaagtggcgctggacacgagagcgcgtaaactttgggatcgtgaccatcttgcgcgtgagtctcgtatccgttcaacgttggttggtgcgcacgtggaaacacatctgaatcccgttcagctggagaaaatctacacttgcattacggctaaagacaccaatcgctgtggaattacactcgatcttcctcgtctgaaccgtgtcttacagcgggctcataacacactcatagcgcaagaaaatgatgatcagatcttaaaattgccacagccggcgaaacgtgaagcgctggaacagtctaatgccgcccgttgccaatacatcctgctcaagttggtgtatgagcagggcttctcggattggttacacgccaaaggcatcaaagaactcgacaagtgggtaaaacttgccattaaacgcaccgatgaaagtgcccagcgtctgaacaccccgtattcggatgaccttccagttaaggcccgtgccaatgagctttggcagcagcatgtaagaacactgtcaacaagcgatgccctgggcggtatgtcagcaattgcttatttttttcatcagctgtccgccgcaacagctaccgaatttcgcgtgcaacgccattatgaatcagatgcgagtgccgctcagaaacaagcagcctttattgagaaactgaaatgtgacgtagttgcaattgcattcagcaagtaccttcaaaaagatttcccttggctgctgtcagatctggatccgacgcaaagttgttgtgtaagcgaactggctgtgcataataatgctaccccagtagaactgtggcagcagcgtttatattttctgctgcatttcgtcccagttggagcggtgtcccagttacagcatcaattacgaaagtggcacattttaagtcaccatggtgccgaacatgaatcttcttctctgggtcagctgtatgcgtcttgcgctcaggttatggtactttatttggacatgcatgatgcgaagtttgacggtggtattgcatatctcctctcagatgaacagcgtaaacaactcgaggattgcttcgagttatctgaggactttcaggcatgtttcccgaaaggctcagtccaagactcacggattccgctccgcgcattgagagaaatgttgcgttttgggggcatagaactcatgaacccactgttcgttcagcacaaaataactcatacagagtttgaccgttggactcagttgcagtcgtgcattgagaaatttcagaagtctagagaagaccttcatcaaaaatggatagatcatcctggtgatttttcgaaacaggataaagaggcatacggccaggccttaaaaatttgtgaagaacatcgacatcttgctcatcgcgtccggttggttgatcacgtccagttgcatcggctgatgatgactgttttagctagattaactgattatgctggcttatgggaacgagacctgtatttcgtttgcctggccctgtgctacaagaaaaacatagacctgacaacgttgttcaaccacgaggacaaggaaggccataactttttcgatgatggtcgcatagtggaagcgttacgtaaggtgaaaaaagattttcagtttcccttgttttccgaagatccaagcctgctgttgatttccggatcaaccaaacttgcgggggagttggtttttattcgcaatcatctttcacatttcggcatgctctcagaccagagcagatcaaagagtacccaacttcccaatctgactgacgaagtcaacaaaacccgccagttaatggcgtatgatcgtaagctgaaaaatgcagtttccaagagtgtgatcgaaatccttcagcgggaagggctgcgattagtgtggcagatgcacgatcacaccttacaactcgatccgaatgagccgatacagacccagatgattaaacatctgggtgatccgtccagcgaaagtatgactgaaagtatgcacagcaaagcatatacccagatggttgatcagttattcgggaataaacagttaaactcgcagacgtaa

SEQ ID NO: 362 - DNA, 3372 bp, synthetic construct
  source 1..3372: mol_type = other DNA
atggaccgcaagtatatgaccctggatgataagtactatttcgcagcgtacattaatatggccagacataatgtctacttgttactggcagacatcagcactcgcatgggagaaaaagttcccaacgacgatgcaaaactgatattcccgatattacaaaagctggaaccgaagactaccacaggaaaaaatagcgtatcgcccgacgagcagttaaaaataatcaaagagctgcacaaacattttcctttcctcaaaacgatgctgtatgcctataagaaaccgatgggtgcagcaactgaggaagaaatacagaaaatggactacgctccgggcgattattatgatctgtttaccctgttctttaaagtgcttaacgactacagaaacgaattcacacatacgatttcacagcccaatgttaaaatactgggcaccgaggagtttcgtgttagttatgtctttgattttcctgcgaatttgttgtatggtctgcgggtgacatttgatactgcagtacggaaagcaaaaacccgttttaattttaccccagatgatactaaacaccttctgcgtcagggcaaaggtggcaaagaattagtggggtttaagtataagtttcaggcggaaggttccaagagtcttacgattcatggtctgacgtttttcatttgcctgctgctggaacgcaagtacgccacgttgttcactcagaaattgcaaggcttaaaagacaaacgttctcgtgggtttaaagccacctatgaagtgtttgcggtgcattgtatacgactcccaaatgcacgatatacgtcagacaccagtaacggtgccctgttattagatatgttgaacgagctcaaaaagtgcccgacactgctgtttccgcagctgccggctaaaggcgaacagaataaagatcaagatgcgtttcgtattaaagttgaagatatgcctggcatggaagaagagggcgattctggttttgttctcctgaagcgccatgaagatcgtttttcatatcttgctctgcgttttatggatgaagttaagtggtttaatcttttacactttccggttgatcttggtaattatcactatcatctttacgataaaattgtggatggtctgccacgcattggttcattatgggaaaaaatgattggttatggccgtctccctgattatcagcataagtttctgaacaaagattatccagctgagtggcaactcctgtggcaaaaccatgaattaaagaaagaaaacgagaatgacaaaagttcttatatgccgcccacaatgcctcactaccattttcctgatgggaaagcggacaacatagcaatcaaaatcacaaatccggaaactttgttctggcctgcgatacatattgatgggaatgataaaaaagccgggaaaccagccaaaaaagaacatccagaccttttattaagtaagtacgaactctttgcttttattttctacggacttttgattgggaaagaccgcatcaaaaaggaactcgaggataaactggttcagtacttcaacaaacgtaagcaactgtatcgcaatattatcaacggtaaacttctgccattagcattacctgctgatattccaaaacctaaagacaaaggtaaaaaaccgacgggatatgatcaacgtaaagagttgctgaaccagaaattagccatctatggatgtactgccgatgaattaccagacgagattaagtgttttttaatgggtgtgataaccgaatcattcgaaatcaaggcacgctatcggttagaagatctgatcgtagataccgagattctccaggagcgcattaagcgtcagctgaaggagaagcgaaaacctggaagcaaaaaagatgtcgaaattaaagctggcgttttagccggctttctggctaaagatatcatgttgttccagcccgctgataaaacagagggcgtcaaagcttctggaaaaccaacaagcactctgtacaatgtcttgcaagctaaactggcgttgtatggtgctaatgtcgataccttagaaagaaccttcaatgagtgtggtctgttatcggggtccacgaaacatccttttttaggtcaggtcgtgagccggaaaccggcgaccattgtggatttttacatggcctatctgaccgcacggcatagctacctgttaaaatgtgagaccgacaaaaattaccaagcgtatcaatggctcaaaaataaccaggcgcgcaaaaaaactgaaccacacttcggtcagcgcttggctgccgaaatggaaaaactgcctgtagtgataccacgtggtttctttgcagagtcgattaaaaacgaactgttagcgctcaacaacgacaaactgaatgcggcaatagtttctgcgcgcacacccaatacatcctttatgtttatggcatatcttaaagagtatcttgatgacgatgttcaagatttttatgggtggccgcgagtttataagattttcgacaactttcacgacaaacgtaccaaaagtgagatgcgcaaaagtctgaaaccggaacccttatcggaagaagcgcgtaaaggacagatggatgaacttaaaaaatggattaaggaaaccccgaatgacgaggattatggaaagtttaaaaagcgttatgatgacttcgaatcaaatgagaagcagatacgacaactgaaggtacaggatattacaacgttcgccatgtgcgattatttgctcaagaacattaacagaaaccttattaactccgatggccaattttatctgaaagatatcgccccgaaaggcgacaaaggcattctcgacaaacccatgagcgattttggcagagtttttgattattgctgcacatctaaagattttgccggagtagagattactatcgaagggaaaacacggattttccaggacgaccttaaagtcaaaaatattggggatttcaataagttcatcaaagacagaagactgccgaatcttctggcgtatcttcagaaagaacagattcatcgcgcagaactggaaaaagaattagaacggtacgacattgtgcggatcgaaattttcaaaattattcacgaatttgaaaaggccatccttacgaagtacccgggcatcgatgggaaggactttgataatatcatatctcattttcagcagtccaataatcttccggagctgaccgcaatgcaaataaagaagatccgtaatgcttttagccacaatcagtatcctgatccgatctactttctgaataacgaggacttgaaactgatcggtactacgggagtagaattgtacacggattacttcttcaacttcatcaagacaatattagtgtcagagaattaa

SEQ ID NO: 363 - DNA, 3345 bp, synthetic construct
  source 1..3345: mol_type = other DNA
atggaaacgcccgcgacccccaattataaacggtttgattatgaatcagataaagcattttatgcggcttttttaaacaccgccacacagaatgtgtttatcatcttaagagacatttcggaaagcttaggtttggggtttgacctgtcaaacgacgacaatatgctgaacgttaacctttggaatattttgcagtctaacatagagccagagttatcactgcacataattgagaaaattgaacgacagtttccttttgcgaattatctggctaaaaattatgccttttacaaacgcaaagaacgcactgcggaacctaatgattactgtaaagtattcgagatgctgattggacaattgaactcgtatcgaaattattatagccatgcagtgcatgactatgtacaaatggatccaacaataattaagggtatgcaagtattatttgatgctgcacgtcgagaggttaaagttcgttttgcacttaagacaaaagatgttgatcatctggtgcggttaagttcacgcaaagtttttggcaaaaacgaagcctatgaaaaggaaacttttgaatatcgctttttggatgcgtcggaatctattactgaaaagggctttgcatttttcatttgtatgtggctccagcgcaagaatgctcaagagatgctgaaaaaaatgaccggatttcagaaatccgattcaccgtcccaaaaggctaccttagaaacttttactttttattcggcacgcgtaccgcaacctaaacttaccagtgacaatacaaaggaagggctgttgttagatatgataaacgaactgaagcgttgcccgaaagacctgtatccgctgctgagcaataccgacagagagaaattcaaatcaattgaaacggacaaggataccagctttgaagatgaatatgaagctatgccgattttaaaacggtctagtaatcggtttaactatttcgcgctgaagtaccttgataactcttttgagaagattaagttccaaatcgatcttggtaattattgctttcacgtttacgatcaacaaattgacggcgttgttaaaaaacgtcgctggattaaaaaaatgttagggtttggtgtgctggaagattttgcagatcgtaatagaccagacgaatggaaagaaaaaattcaaaaaattgaagggcgtcatcataaaagtgatgatgtctatgtagaggaaacaaccccgcactatcacattaatgagcagaacatcggcctgaagatctatgacaattacctggagtctaaaaaggaacgaaaaatatggacgccactgcctgaatttgctaaagaagataaacaaagacataatgaaacgaaacctcgcaatgaaaaaccggattgttggctctcactgtatgaattaccagccatggttttttatcagattttattccagcgtggttactcagttctgtccgctgaaaaaattatcgaaatacacaaggaacgcatagagcgtttttttgaagatgtggaaaactctagacttaacccgggaattactaatgatgctttacttgccgaactggagcgtcgtaatctggaaaagtccttcatacccaaagcaatcattaactatcttctgtcgaaaaccactgaaagctttgagtctctggctgaaaagcggctgaacgagttacgtttagagactatcgattaccttaacatcatcaaacgtcagcgcattcatttcatggataaaccgggcagtaaaaattatattgagatgaaaagtggagagatggcaaattttctcgcacatgatatgatacgtatgcagaaaccagttggtaaagaggatggcaaagcaaattctacagaatttcagctcttacaggcgaaactggccttcttcacagtgaataaaagtactctgttcgagacgttcaaactttgtaatctggttgatgcaattaatgcgcacccgttcctgttcaatatcaatatctctgaatgtaatggaattctcgacttctacattaactatttggagcaaaaggtcgcctacattaacctttgcaaacgggaaaagcgttacgaagattatcatttcctgaaaattggtgaacgccggcgcagctcggggaaggaatatatcggcaagcttagcaaagagctgaaagatgatgccgtgatgaaccttcctcgtgggctctttctgaaacccattctggaagctctcgattccaaagataaaacgaaacggctggtgaccgagttcaagaaactggacagaattaatgccgcgtttattatcgaaaaatacttcgcgtatgttaaggcagataaaccgcaggaattttactactacaagcgcagctatgagttgctgaacaaaatcttagataaccgcaaagattttgagaaacgcaaaaccatcgccaaacagtactttgacacaaacgaattaacccagatgacgggcaaaattgaaggtaatcctaaagagaatccgattacgcgtctgttaccagtcctcgtacgcaaccatatcttcaataaccgtatcaagagtgaggatgagaaattgcgggtcaaaaaggtctactttgaaaaatataaagactttacggaaagtgagaaacagtttagactcgcgaaaacttgcgacattgtgctgttcatgatcgccgacgatatgttccgaaagaacttcgtggtggataagagcatattgaagaataagaacaaagtgtccgttcaggatgcggtcgaaatcggaaaaggctataaacttagcgaaataaaaccaaattctgacgaaggttttttgtcccttcagacacgtgtagagcttcagatacaggacaagacaataatcaaagaacagataaaaattaagaattacggtgactttcgtggcctgttaaaagatcggaaaattggatctctgctgcctttcatagccgacaaagaaattcagtttgaagcgttacagaaagaattagaattctacgataaggcccgaatagacgtctttgctaaaatttttgagttcgagaagtcaatcatcgcaaaaatgaatctccaaaaaaaccccgagggttttattaatcacaaagacattcttaagtccttgatctcagagaatgacgagcggtttatcttggtcatgcagttgagaaacgcgttctcgcattccaattatccggactacagtttgttcaaagataaagtggccgattatggttttaatgatctgaagaaccatacaagtaacgatgataccatcctggtcaaaagctttgccgtacagtttaaaaatttgatactctcatattatgatgaattgagccgtatataa

SEQ ID NO: 364 - DNA, 3330 bp, synthetic construct
  source 1..3330: mol_type = other DNA
atgcgtatacctcagctgatcgctcaaaataaaccagtttttggaacttatgcaaccatggcgcttaaaaacgtgcagatagtacttgatcacatccagaaaattgagtctctccaggatcagatgccagagcgcagacccgaggatttttgggtgcatccagtgatgcagtttttttattccgaacgttatgcaacgaatgtcgatccggagaaagcagacgctattaaagaacgcctgtttcgtaattttccctttcttaaaatcatggctgaaaatcagcgcgactatcgttgtaataaagatcacaaaggaaaacgagggtaccgaaataataatatcgactcgtcgaatctggaaatcaacggtagtgacatctactatgttctgaacaatatgtttcgcgttctcaagacgtatcgagacaacacaatgcacgccataattaaagatgataaaattgaccgaaacgacagtccttttttagagaagaacgagtccccactcagtttcacgattaataactattacacagttgctttacgaaatgtcaaagaacgttatagctatgaaactagcgaccttgcattcattcaggactacagaacagacaaacgaactctgaaaaccgattttaatttcttcctgtccatgcaggcactgaacggggacccgacaggacgtattcatcttagtggcgtaggggtcgttcagttgatatgtctctttttagaaaagaaatatatcaacttgttcctgtcaaaactgccagcgctgtggggcggctacgatgaaagctcagaagaagcacgcgtgattcgtcggtccttaagcatcaattccgtggttttacctaaagaacgcattcgttcagataaacgttctatgtctactgccctcgatatgatcaatgagctgaaacgttgccctcgcgaattatttgatactctgagtcaggaagatcaggatcgctttcgtgttgtttcctctgattataatgaagtcttacatgtgagacattctgaccggttcgcccaattatccttgcaatatattgattccaatgaactgttcaagggtattcgctttcatgttaatatgggtaaactgcgttatctttttagtgcgaacaaaagttgcattgatggtggtgttcgggtgcgtgtactggaacaaccattaaacggatttggacgtctcgatgaaatggaacaatatcgtcgccagaatgataccacctatggcgatagcaatatcgtgattcgcgactttgagaatgtgcaacgcgatgctgcttgcgccgataactacccgtatgtcgtagacacctatactcgttatttgcttaataacaacaagatagagatgtgcttctccaacgataaagtggtcccagatatcgaactggatgggggtaagtggtatgttggcaaaaccattccgcactgtcgcttatctaccttagaactgcccgcgatgatgtttcacatgcatcttttgggtgccgaaaaaacggagcaaagaatcaaaagtgtatattacaattacaagaaattgttcactgggcttaaggaaggcacgttgacaaaagaaaatatcgattcctttaatatatgtagatcagacatgccgcaaaaagtattggatgcagtaagcggcgaggataaaacaaaacgtgtgtctagctatgttgaagataccttaaaggaacttctggaagagaccgctcgcttaatcaagagatttgaagaaaccagaaaagctataggttcaagtgctaataaacagggaaagcgtaattttaaaagtattagcagcggcaagctggcggattttctggccaaagatatcgtaaagtttcaaccctcattagaaaaagatgaatattatggcacagatcggatgactggtctgaactatcgtgttatgcagtcgtcgattgccatgtacaacagtatgggtgataagaaagcgatgcaggacttttacaatatgttcaaagccgctaagctggtggaagataacaaaaaatcgcatcctttcctcgcagtcgcactcaaacggattccgaaaaacgcgattgagttttacgaacaatatctgaaagcccgcaaacagtatcttgaaaagaagatcgtagagttcaataaaaccgaacacgttcggatgtttgcagccaatcttccgtttattaatatcgagcggaacaagtgggcctcgcgtgatgaagatttctatcagattttaggagatagctaccttgaagtttcacccattgaactccctcgtcaaatgtttgatgacgagataaaagccaagctgaaacagaaaccggaaatgcaggatatagactttgacaaggcgaacgtgacatatcttattggcgagtatttgaaacgcgtgcataatgacaatttccaggagttttatgattgggagcgtaactatcgctatatggacatgctggagtgtaaagtcaataacaaaaactcaatagagaaacagtatttgacgatagcagaacgcgaagatgcgtgggccaatcgtgaacaaggcgtgaaaagatacacgcaatgggccaatgataaaaaactctcagatgcgaagtttaaaaatatgcctgagacagagtatgctaaaattgttgcaacccggctgtctagctcaagaaacgattaccagaaatcggaaaaacatattcgacggtacaaagtacaagacgcaatgatgttctttatggtcaaagattcattaactaagaacatcaatttcgtggcgaaagatttcaagctgcaggatataatgccggatgcagataaaggtattttaagcgggatcatgcctatggacttcgtttttgagaaaaaaggcaaggtctacaccattagctcacaagggatgaaactgaaaaactacggggacttttttgcgttagttaacgacaaacggatgagttctttactggaactgctgccgacgccgcagataggtaaagaagatattgaacaggaattcaaaggatatgacgacagcagagtagacgttgtgtctgtgattttagatttcgagaagttcgtctacaataagtacccggatattaagaatctggctttgcagggtaaccatttcgattttctggatatgttgaaggaactgataaacaagggggaccttacagagaatgagaaagaattgctgcgcaaaatacggaatgcgttttcgcacaattcttatccggaaggtggcatcgtcgagattcgtacgctgccagaaattgcaaaacatctgatccgtgtatttggtaattctattgaacgtatccagcattaa

SEQ ID NO: 365 - DNA, 4143 bp, synthetic construct
  source 1..4143: mol_type = other DNA
atggctaattttcaagaaccggcacgtcatatatttggttcctatcttaacatcgcccgtgcaaacttctacaaaacgatattccacatcttctcaatatcagggatcgactgctatacgcaaaagggtgacttgtatttcaaagaagataacctggacaaggtgataaaggtattctacctgatctcgaaaggcgaaagcaccaaagatgaagggacaaaagtatcactcgaagaagaaatcaaagcgtcgatcgataccgtttatgaagtcatcaaaaaatgttatgataaccgctggaataacgaggttaaacagtacacaaatttgacggaacgtgaaaaaaatgcacgcaaagaggctttcaaagcccctttgaccgatgaaggaccgaatggggaaaaagcaagaattcgtaatacctttacaattaaaggagagcaggaagaacgcttccgcaaaatgttatttcgacacattcctctgctggctccgattatggcgaatgttgtggcaatgcagttcaagaagaatgttaatgaacagaaagagagcaataaggcgatgcatgacgcgagcctgacggactgcttgaaagagttatattcgattgcacagtgtctcacggattgcagaaatttctacacccacatgaatccctacaatagtattgaaaaacagaaggatcagttcaaactccaaaatatcatagccggcaatttggataaagcgtttgctgcaagccggcggatcgccaaaaaacgtaacagctattctgaatcagatctgacttttttaacgggacatcaggatgactgtcgtatgcaagaagtgtttgtcctggacgaaaatgggaaaaaaaagtggaaagtcgaaaaaaacgagaaaggcgaaaccaagcttgacaaggagaagaaccctatctacatctacaagaaagtgaaagctaaagacgataaagggaaagaaaaacgggatgaaaatggtaaacccatctatgaggtcctttatgaagatggaaaaccagtacacgagtatgaaactaagttgatcgagcgcgaagatttttattacagaatacgcgggattcggcaaatactgaacccgaatctgactcctaatggcgaagtctgcgatggattgtctgcttttggtatgttatacttttgttcactctttcttagtaaggaactgacagtacaactgtgtactgagacgcaaattttcgtgaacagtccgtacaacaatgataacaataagaagagcaatatcatcttaaacatgatgttcgtttacgcgattcacattccgcgtggcaaacgactggatagcgaatgtagttctcaagccttagcgctggacatgttgaacgaactgcgtcggtgtccgattgaattatacaatgtattgccagccaccgggaaaagagagtttgaagacgatattaaacatgaaaacgaccggactccagagctcgcaaaacgcatacggtccaaagatcgcttcccccatctcgctctgaattacatcgacagtcagggcctgtttgagaacattcgttttcaagttcgtttggggagctaccgtttttgcttttatgataagatatgtatagatggtaaaaaacatccccgtcagctgcataaggaaatcaatggctatggtcgtctgcaggatatggagaaagcacgtaaagaacagtatggccatcttttccaactgtcccgcgatgaatctgtatggcagaaagatgaaaatgcttatgttaatcttcggcagcttgtcccggtgaaagctggagaccccgcgcatattacagacaccttagcgcagtataatttttatcagaatcgtattggcctgttctggaacacagatgacgagacttatcttactgacaaaatcaatgcccagggccaaattgtcggtaaaggtttgtatctgccgcctttatctgcagtggatactccaacaaccaccaatcgttataaacgtaaagcaccgattgatatgccagctcctctgtgtagtctgtccacttacgatctgcctgctctgctgttttatgaacagctgcgccgtaaacaccagttagaaccaaatgacttcccggcagcggaagacatcattattcgccaatatgaaaatatggtgcgtttttttacggaagttaaagatatgggcacatttgataatgacgatgccctgcaagagaaattaaaagagtatggcttatcgaaagcctctattccgcagaagatctatcgccaccttgttcagaaaaccccggataatgcgaaagactttgagaaatccgccaaagcggagctgcgccgtcgtttacatattgccgaggcgaaactgtcttgcttcgataaggataaagagaaaatggaatcagacaaagaagatgaccggaagtacaagaaatatggcagtaagtactttatatcgattcggtatgcccaactggcccggtatcttgctgaaagcataatggattggacaccgaatgcaaaacaaggtaaagataaactgacaggattaaactatcgcgttctcgtttcatccttagcgggatttggtactcgttattctgatgaagatatattacaaattctggcggacgcgcacatctatgtggatgagaaaaacgaccacccctttattggctacgtgtttgatgaatatccaacagatattgaaatgctgtactccgagtaccttaagcgagaaattaaagagataaagaagtacattagcgtgggtattgatgccaaaacgggtgaggaaaccattaccttgaagaaagatgcaagtggtattccatttctgcatcatgaccgaaaacgatggcaacagtcttcaattgcagaactcacagatcgctatcttcatattaaagaggaaggaaaagctgaacctgggagagctacgttattattaccggacggactctttgcgccgtatatcgtcaaaatgttagaaaagtgtgactcatctgcacttgaaaattgcgatgacaagagtaacgccgcatttcttattagccgctatttcgagaacaaatgtgagaaatctcaaccgttctatgacaccaccgaaccatctcattttaatgatgaattgcggaaagtaactccgtataagtatagccgagcgtatgagtattttaaactgctgaacggcggtaaggatatctatcttcctattactgaaattaaacgaagactggcagataaagaacggagaatagacgccaatatcaaaaatctgaccgataagggtaactatcaaacgatcgaggaagccagagaaggtcgtcggcgcaaacttgaacgcgcagttagagatatgcaggacaatgagagagctattcgccgctacaagactcaggatcgaattctgttcatgatggccaaaagtatgttaggggatattgtgaatcagaatgcagatctttttaaactcgaaaatgtttgcgagaacaatttcttgtcacagcgcgtaaaggcccagattagcgtgaaaagtaacaaccagcagatcacaatccagaaagatgacatgccaataaaggattacggtaaactgtttcgcttattaaacgacgaacgtaccgtccagctgctgagctattccatacttacgaatccacctctcattgattttgatcagatcagtgaggagctcaaacaatataacaccatacgttcttcagcctttaaaagttttcaacagatggagcaggaatcctttattcagcatgaacgtgtcttaacggatcctgagaacaacgatttttatcagggcggtagacgctacaagaataatgaacaaaccaaagagaatgatgcgaaacgcaataacttttcgtcattgctgaagattctgcagtgcctgacacccgaggtgatgaacatgtttgaggaaaatgatcgtcagttgataacagctattagaaatgccttcgatcataacagctatcccaactgggaagtgtgccgccagttacttgagcaagaacagcaagttaatgcgaacattcagctcgaactgtcccaggtagctgcattcttaatctcgaagatccgtaactatgttaaacagatagaagaagtttgccattcgtcacaccagtaa

SEQ ID NO: 366 - DNA, 3342 bp, synthetic construct
  source 1..3342: mol_type = other DNA
atgccgctgcgctttaaaaattcagaagaacggaagccggtcctgggagcctatgccgctatggcccgcaataacgcttacattatccttagcgacatcatggagcgcttacatattgagcaaccgccactcccagacccagctcaccctggccaatgtttagataaagaagcacatctggacaaactgagcctctttcctcagaataatgatctcatgccggaaacaaaggataaagcaatgaagctgctgtgctcccatttccctttccttcagactgagggtgatctgcgtattatgaatgctccagatgggcgtgaacaggagaaaatcccgatcacctatgaggaaaaatgtcgtactttactggatgcattggctgttttaacttatcttcgggatgcgaatcttcattatctttttaatgatcgtcgcgctgaacaccttgaatatcgcctgcctgagagcaaagcttgtcatctgttacgtctggtgttaaaagcggcgccgcgcaaaataagcgaacggtataaaggcactgggttaatgcctgatggcgccctggatttttttatcaaaaagcagtatgtgcgggaaggtcgttcgttcaagttcaatatgaattggttgttttctccgcagcgcgagccggaaaaacgggaaatggatgtttatcgaaaagtggaattggccggcggtgtggagagagatcttgttgcaaaccctgacggaaccccagccagattcaatcggttaagcctgtttggggaagttttactgataagtttattcaccgaaaagcggtacataccagacttccttaaagcctgcggattgttgaccgataatggcttcacggaaactacacaggatggtacattgtcccagcagcggctgattcgtgagatagttgcagcgtatggcattcgccttcccaaacgtcgattggacattactatggatgcggaccaagtaatgctggatatcttcaatgagctcgcgaagtgtcctgatgagttatatctggttctgcccgaggccaaaaaaaaggaactcgaggcagtcaatatcgatggggagacggttatcaaaaaacgccacagtgaccgttttgtaccactgttgctgcggtttatcgacacgaacgagttgttcccctctattagatttcaagtgaactcggggtatcttcgttttctgcatcacgaaaaagcagcttatatggatggcgttgaaagaccgcgtatcctgcaggacgccgtgaatggttttggacgcattcaggaagttgaacggacgcgttcagcatcagatacgtatcttggatttccattatacgcaccctctcctgatgacgatgccccaatgtctctgccctgtattaccgactcagcgagccgctatattgttaacggtgaatgcataggtttatcaatctctggggatcgcacaccagttattattcaagacggtggtaagtatcgcgtccgctcccccttaccggattgttggatttcgcgatacgaattgccggctatggggttttatttgtatctgtgcaaaaaatacgatcttagtgtgagcgcggagaagatcatcattgataaagtaaacgaatacagatctttttttcaaggtgtcgccaatgggacaatcactagtctgaaaggtataacgctggcggaaaaggacattcctggtaagctgttagactaccttaatggcaagaccgacagttcagattttaatcgctataagaagaaccttatccagtccttactcgagaaaaccgaaaatcgtttgaaacgttttctcgaagatatggcaatggtgggcagtaaagaaaatcgaataggcaaacgtagctttgtgagagttttaccgggtaaactggcatcctacctggcagatgatattgtatttttccagtcatatccggcgggccatccggaaaaacgtctcacaggtcagcaattttcgattctgcagggcttgctggccaccttcccgcctgatattgaagattcttgtcgccgtgcgggactcctgtccggtgaaacagcccatcccttcctgaaagctgtgttcgattcgataccagccaaagatagaaacacgttagtattttatgagatctaccttaaacgaaagattgcgtttctgaagggccctataccggacagcgcgcccttcctgcacccaggaaaagtcaagtggcaaaaaaaagatgcggcttattataaagccctggcacagagatatcttgatggtggcaaagacggctctaatactggtattttattaccccgtggactgtttgatcaggcgattaccgatgttttaaccaaacgttgcccaggttggtcaagagcgatccagaatactgatcatgctaacaccgccttcaagattatcacgtatctgttggatgggcaagcagatgactaccaatggttttattatgaagaagaccggttacaggagtatcgattttcccagttaataattagccagaacgctgtaagaaacggatggaaagatcttaaagccattctgcaagaagagggcgttaagctgaaaggtaattactacaaagagctcgagggtcgtatatctgctctcagacgtattccgccggaacggctggctcgcaacacaatgaaacgcgaggagctccgtcaggcactgcgttcaagctatgaccgtatgtgcgaaaacgaaaagtccatccgacgtattattgtccaagacatcgtgctctttctgctggccagatggcggctggatccgcgagagaaattaaacatgagtatgataggtcaagatgaatcgaagctgatgaatcaagtggtaaccgttgacactttatacaaagggcagtatcgtattcgccagaatgatgttcgcattaaagatcagggggttctgttcaaaacattgaacgataagcgaattgacagtttattggatcagttggcggtaggcgagggagaagtgattgaccttgaagaccttatagcggaactgacccggtatgacgatcgtcgcattcctgtcgtcgcaaaaattatggagtacgaaaaacgcgtactgaaaaaccaccctgaattacgtgatcgtagtggtcgtatggattttaaaagtgtgcagcgtgccgacgaagcatcatcgccgcagaaaaaagtagtcttacgcacagttcgcaatgcttttagccataacgcatacccggatcgtgtggtgaaagcggaaggcgaagaaggaatagaaatctacaacccgatcatccctgggatggcagacggcatatctggaacaacgaataaacttgtcgatgaataa

SEQ ID NO: 367 - DNA, 4185 bp, synthetic construct
  source 1..4185: mol_type = other DNA
atgggcaaaatagtcaaaccgggcgagaagatccgcgaaatgaaagaaacctacaagtttcgcgtcaacaaacacccgttctccattgaagaagttggcaaaaatatctgtggcgcctacttcaacatcgcacgtcagaatttttatcgtacactcctgcacattttcagctcggttgggatagattgctacacgagtaagaattccttgtttgtaaaggaagatactatggcaagtgccctcgaggcgctgcaggctatagagaaagataaaaacacaaaagaaaaagtgacgcaggctattgaatcgctgtatcaattagtcgagaattgttatgacatggagtgggagctgttttgtcaaaaagagtatggtggaaagatttcatcaattaacgctgaattgaaaaaggatttgagtgaggatctgaaaaatcagctgaacacagagaaggagaagattgaaaaagaacaacaggacaagcaggaagagttttacaaagacattgaaaatgagaaaaaccgtctgcgccaaagttttattctgaaatcggaacaggaagaaaaactgcggaagctgttgttcaaacatctcccgttcctgtctcctatcatggcagatgtggtcgcatataataattcacatgctgaaggtgacaccatcaacaatggagtaatgaaagacgttaccctggccgaatgtttgcaacagctggtgaccatagcaaagtgtttaaacgattgtcgggatttttattcccattacaatccgtatgacagtgtagaagttcagatagagcaattcaaaagacagaatgatctggcaatcaaactggacaaagtttttgttgcttcccgccggaaagttaaagaacgaaatcagtatacggagacgcaactcgagtttttaaccggcaaactgcactatagaaatctcgaaaagaaagaacgcgataataatgggggcaaaaacaagatacctgaggagcgccgctattattattaccgtattcgcggcgaacgcaagtttaaagatgtcgaaaattttgaggactataaggataaaaagtctccagcgatgtcggactttgggatagtgtttttctgcagtctgttcttgagtaaggaatacacgacattaatgtgtaaccaattagaactttttgatcactcaccctttactgaagaagcgaacaatatagtgcataacatgctgtacgtatatcggatccacacccccaaaggcaaaagattagattctgaaaatgatgaaaacgcattaggaatggatatcctgaacgagctcagacgctgtccgatgcctctgtatgaggtcctgccgccgctcgggcgcaaagaatttgaagatgatgttcggcatcaaaattcccggaccgaagaaataagcaaacgtttgcgttacgtagatcgttttccgtctttagtgttaaaatacatcgatgctcagaaactgttctctcaaattcgttttcaggtacgattggggtcttaccgtttctctttttatgacaaaatttgcatcgatggagaacctcatcttcgcattttacacaaagagattaatggatttgggcggttgcaagacatggaaaaactgagaaaaagtgaatatggcgcctattttccaaaaacgcgtcaggataatgtatggcagcgtgatgaaaatgcgtatgtagatcttgtgcagctcgttccaaacaaagctgaggacgatccgcaactgactaatagcatcgcgcagtacaacattcatcaaaatcgaatcggcctgttctggaaccaagagggaaatagcattttggtggataaaaaaggagaagacgaaaaaccgttatatgaaggttattatctgccgcccctgtctgttgtgaaacagactacttcagagcctgaaaaggataaaaacaaagcccttgtggaaatgcctgcgccactgtgctcgttatctgtttatgatcttccgggtttaattctgtatcagcatcttgttgctacacaacagggctgcgagtctgtggatgacgttattatccacaagtatcaaaagatggtgtcattcttcaatgacatcattgaaggtaaactgcagcctcaggattcagttgcggagctggacaaaaagcttaaggactactatgatctctctaaagctagtgtgcctaaaaaagtttatcgtatattatccagtcaagaattcaacagagaagaagatcttaaggcctttgctctgaacgcattaacacgtcgtttaagaaatgccattcggcgtaaaacgagattttcagaagaccttgccaaaattggtcagaaagacaacaagtacggcaaaaagaattttgttgatgtccgccacggggccttaggccagtatctggctgaatcgatactcgactggcaggttacttttgatggtggtaaagataaacttactggtttgaactatagagtcctggcatcgtgtctggcaaagtttggtgatggtaacaccaacctgaactatattaaaacgattttacgcaaggccaaaattcttgctaatgagggagaaaaaatagccaacgaacatcccttcatatcaaaggccctggacaattatcccgataacatagaggatttctatttggattatcttgatgccgaaattgaatacatcaagaaatatgtggacattgaggaatccgggcaggagataaccaaggtgacattgaaaagcgatgcggacttgagtaaactgaactttgtacatagcgaacgtaaacgctgggttaagagtgcagcagaagatctgaaagaattagccgcgcgttatttgtatgtggaagatcgtaatgtgaacggtgaagttgtgacgcaccgggctacattattattgccagatggcttattcgcaagcccgattgtagaggtattaaaaaaaagatatgaaaaagatgacccgattatggcagcgcttaacaacgagaatcttaatcataacgtagattacctggttaaacttgtctttgagaaagaaaatgccggagacactagccagccctattataacagcaattttgaagtattacctgtctacaactctaataccgttccagactttcttcgcgagaatcctggtaataacaagtatgtccgtggttacgaactgttcaaagcaattcatggtaaacccatcttttacagcagtgacgaaatccaggtgttcctttctaaaaaaatcaccgatcgtaacaccgagtcacctctgaaaattgttaatcgccagggagaagaatgctgcaaacgtgaaatccatgcgaaaatagacgctaatgtggaaggggtgcgtaccaaaggtgattttgattctctggaagaagcgcgaaatgcgcgccgtagaaagcttgaaatactgttaaaggagtgcaaagagtccgagaaaacaattcgccgctacaaagctcaggatatgattctcttcctgatggcaaaaaatcttctctccaatgcgattggagagtcagacaagttcaaactttcaaaagtctgcgacgatgactttctcgatcaaaagatcaatgcccacatcactttgcatcttgatgattacacggttaagattcagaaagaagagatgccgatcaaaaactacggccagctttttcgactgttgagcgataatcgagtcatgacaattttaagctatccgtccattaatgaagccactttagaatacgacgatctgattgaagaactgtccatctacgatgaacggcgtacctcagtttttgacgtggcgcaaaaattagagcgtgcgtcgtttgtacaacataaagaggagctgacaaatccagaaaacgatcttttttattgtcataacaaacgatatcgcgtcaacagcggccgagagaatcagccaaaacggaataattttgaagcaatgctgaaattactgctcaagatgacaccgcagcagcagtcaatgtttagtaaagtcgaacaggactttatcaaaaatatacgtaatagcttcggtcataacggctatccaatccggaataccatcgaacgtattgccaatggtaatgatccaaagtttgcggatttgaaagagatgcagctgaaaggtattgcaagcctcttcgcagggaaactgttagattgcctgaatgataataatattgaataa

SEQ ID NO: 368 - DNA, 3306 bp, synthetic construct
  source 1..3306: mol_type = other DNA
atgaaattgtcactgaaaccggattcacagctcaaacctatctttggagcttacgctgcgatggcgcggaacaatattttcctcactgtgctggatgtcatgaagcagttacacataccccaggagccattgttcgacccgcgcggcaatgagctggaccttgaagccaatatctggaaactgagcttatttgttatccatcttaaacccgagcagtcttcgaaagcggataaactgttacgtactcacttcccttttctggaccttctgaacgatatcaaaatcggatcaattaaaggtgaatcgtttcattacaatgtgagtttcaaggacacgaaacagttgttgcttaacggtgtgaatgtgttatcccatcttagagacattaacctgcattacaagacaaatgacgggaaaataaacgactactattatcggaaatatgaaaacgtatggtcaaaccatctgataggtctgctcaaggctgccccacgcgtcatcaaagagcgttataaacagaccagtctcctgtctccacagtcaatggatttttttaccaaagattcctaccttaaaaacaccgacggttacattctcaacccagactggttgttttgcccgacacgaaaaccgggcgacaatgagctttacatctacaaagataaaaaaccttatcgggtggaaaaggaacgttttgatcgtctcacccgtttcggggagattttaaccattgctcttttcatcgaacggcggtacatctcggattttttaagtgaatgcggtctgttaggtcagtttccgagtagcacaaatgacggtagtatatcccaaagacgtctgctgaaagaactgattagtgtatattgtatccaccttcccaaccgtcgtctcgacatttcgatcggtgaaactcagatcaaacttgatatgttaaacgaattggcaaagtgtcctgatgagctttatatggttctgccagacaccattaaaacaaagttcgagataatcggtatcgatgggcgtccggtctttatgaagcgctattcagatcgctatccggcattacttctgaattatttcgacacgactggctcatttgaaaagctgagatttcaagttaacgcgggctatttgaaatatgttcatcatgggataacagattacatggatggcgtcggccgtgtgcgtattattcaagatggtctgaactgctttggtcgtcgccacgaagtcgaatccaaactgaaagaacagttttcgattcatggatttccggtcatacgcaataatgaagaggaagcaaatattgattacccgtttattaccgaaagcggaacccgatacgtgtttaacggtgatatgatcggaatcagtctgtatggagatatcatgccacgcttcgagcagtatacagagaataataccgtacgttatcgtgttcggaatactactcctgattgttggatatctaagtacgagctcccagccatggcattctattattatctgtctaaaaaatacaatgaaggcgtttcggttgaacagctgctgtctcagacgacagaacaatatcgcaagttttttcagggagttagtgatggcacgataaaaagcttatcagacatcgatattcccattaaagcaattccgcaaaaacttcagctctttctcaagggcgaatccagtcacgaagattataataagttcaaagagcgcgtcatctccaaaatgattgaagagaccgatattcgtctgagtcgattaaaagacaacctggaagtggtgtttcaacgggataataaaattggcaaaaaaacacgcgtacgtttaaagccgggcgtgttatcggattatctggccaaagacatcgttcgctttcaatcatttccggacaatcatccagagaagaagatgaccggacaacagttttctatattgcagggtttgatagctacttttagcgaagagcttgaagtaagctgtaaacgagccggtctgttagatggccctagtagccacccattcctctcccgtgtcttctcacgtcatagagggcaaatgcggagcactattgatttttatcaggcgtatcttgaggaaagacgtgcctatctgagtggtagtattccggatgatgctcacttcttgcacccgaatcgcgttaagtggagccatgataaacaggaatcatatttccggagcctttctacacgttatattaaagatgaaataaccggtgaaagaattggcatttttctgcccagaggcttatttctgaagcccgctctgaaaattatcgcaaacaactgccctaagacggcccgcttcttaaaagagcaggagcgcattaacatgagctttttgatcctgacgtacttggaagaagagttgcaagaccagaatcagggatattattacgatcatctcgaaacaggtaatggtgaatatgacttttacaaaattattgatcgcgagaagaaagagtttggcgacaaacggttagggtatattattcgagcagaacgagatagctgtcaaaattctctgtacttcttccagcttaaaaacgcgttcggccacgtgcgcgagtctgcgcggcctatagccgggacaaaagagctggccgagaaattaagagccgcgtacaataaaatgtgcaaaaacgaaaagaagattcgccaatatatgatccaggatgctactctgtttctgttatctcgagatgttgttgggccagcagggggtcaaatgaaattggcagatatcgatcctacagggaactccgttttagaacaaaccgtagacgttacgacaaattataagggtaaaactatcagacagagaaatgtcaaggtaaagaattatggtgaattatactctgtgctgagcgacaaacgcattaacaccttactggagtatcagccgaaaaccgaaaacagcataccgttagaagcaatcaaagaagagctggtgtcttatgatcatgaacgggtgcccgtaattacgaaaattcaggggtatgaacgcgccatttgtgaagaaaaaccggaactgttctctgatgaagatgcgcgttatgattttaatgacatacaaaatgcggatactaagacgcctaatctgaataaagtagctctgaaaaaaattagaaatgctttttcccataatcagtatcctgcaccggttgtgaaacagggcaataaagagatagttatttttacccattcgttgcccgatgtcgcgcgtgagatatcatcaaaagcaggagaattaacgaactggacgccagaagaaggatccgaataa

SEQ ID NO: 369 - DNA, 3789 bp, synthetic construct
  source 1..3789: mol_type = other DNA
atggcacgcacaaacttcgtgaagactattaactatattctgcctatcgctggggtgcgtggcaattattcagaatcccagatcaataaaatgttacacgccctcttccttatacacgcaggtagatcttccgaattgagcgtagaacagagtaattggaagaaacgcctgactttgaacgtagaacagcaggctcgtctccagcgtctgttgttcaaacattttccggtcttacaaccaatgatggccgacgcagccgagcataaagcgtacctggctaaaaataaaaaaaagagtgacgtgcaaaccgatgacgatgtatttgcccaattcaaaggtgttagcctcgcggaatgtcttaatgtagtcgcactcatggcagatacactgactgagtgccgcaacttctacacgcacaaagatccatataatacacccgaacaattagaaaagcagtatgagcatcaagaattcattgctttaaaactcgataaggtagtcgtggcatcaagacgagtattaaaggatcgggaaggtttaaccgtgggagaggttgaatttctgaccggtattgatcacatgaagcaagtcgataaaaaagatgagaaaggcaacgtcatctacgtcgaggatcgtggtacacgaaaaaaagcgaaagcttttgtggagtacgatgacttctacttcaaaattacgggatcgcgtactgctggtggtaaagcatgctccgccttaagcgactttggcttattatatttttgcatcctgttccttagtaagccctatgccaagctctttatcgatgaatcccgtttgtttgagttttcaccttttgatgagaatgagaacattatcatgcaggaaatgttaagcatctatagaatccgcaccccacggttacatcgcatcgatagtcgtgacaataaagctgcgctggccatggacatatttggagaaatgcgcagatgtcctatagaactgtatgatcttctggataaagaacatggtcagccgttttttcacgatgaagttaaacatcccaattcgcatacgccagaagtgtcgaaacggctgcgcttaaacgatcggtttccccatctggcgctgagatatatcgatgaaatggagctgttcaagagagttcgatttcagttacagatgggcgcgttccgctataagttctatgataaagagtgtattgatgggcgtgttcgagtgcgtcgtatacagaaagatatcaatggttatggccgtttacaggacgttgccgataaacgtatggaaagatgggacgacctgattcaaaaacgtgaagaacggccggtcaaacttgagcatgaggaattatacatcgatctggatcagttcactcaggactctgccgatagcactccgtatgttacagatcgtcgtccagcctataatatacacgccaatagaattggaatgttttgggaagaatctcagaaccctcagggcttcaagttttttgacaaaaacgggatgtacatacccgtcttatccgttacagacgaccataaagctcctattgccatgccggcacctcgttgcacgttatccgtacacgatctgcccgccatgttattttacgaatatcttttaagtcagttagaccaagaggcgcgcaaacaatatcattcagcggaacagattattattggcattgaagctgattatcgcaagtttttcggcgcagttgcagatggcaatattaaaccgtttgccagctcagagaaatttgcggattacctggaagaaaattacccatccatgttgttatctgatatccctcaaaaaattcgccagtatctttcgtctgaacatctgtcttatgaagggaagccagtgacggtgcgggaacgcctggttgaagttactctgaaacatcttgctgagcgcatggagcgtctggaacggcgtttgaaaaactacacggaagaccttaaaaagattggcaataaagacaataaaataggaaagaaggattttgcggacgtgcgtcatggagcactggcgcgctatctcgtgcaggacatgatggagtggcagccgtctaaggatgggaaaggcgcagataaactgaccggtctgaactataacgttctgaccgcgtttttagcaacctatggtacaccacaggcttccattgccgactcagatattgccaaacttagtttaaaggaagttctgcgtaacgcccatctggtgggtggggacaacccgcatcccttcctggaagaggtgctggcttacgataacaaaaacattgaagatttttatctgaactaccttaccgaagaagtgaaccaccttaattcacgtattcaatctttgagctcgaatccgacatataaggctttggaaagtctgccttttgtacatcacaatcgtattcgatataatgaacggacggacgaggaaattcgcgctttagcgggacgttatgcgactattcagctgccagatggcctgttcataccgaatattgttgaccttttagaaaatcagtatgccaccaatacggatatgcaaaaagcgttatcatttgaaggggcagatcatcttaatccgacccgtaatgcgacgtatctgataagtcagttttacaaaactgtgctgcacgacaatgcacagccattttatcagaccgataagagttatactcggcagcaggatggccaaccgcctgttgcattttcattccgccgcgcctatgatctttttacggagctgaacaatgacaaagaagattactttccgtttgagttgaagccgctcttcttaaccagcgaggaaatccagcaacgcttaactgaaaaacgcctgggaaaagatggtaacccgattcctcaacgggagaatggagaaattaagaaagatgctcaagggaatattatttgggaacgtaaaatcacccacgatgttgacatatttgtcaatactctcagcaacaaggatttgaaatgctctaaaaatgaggttaaagagaaacgcgacgcgaaacgcgaaaaaatgaagcgtatggtgcatgaaatcaaaaataatgaaagaaccatacgacgatatcggacccaggacatgatcctgtttttgttagccaagaaaatgttcgttgacctcttgggcgagcagtcacggtccgtcgattggaagcaactgcggctgagcaaagtgtgtaatgacgcatttctgagacagacactgacatttcgtgtaccggtaacggttggagataacacagtctacgtcgagcaagagaacatgtcgcttaaaaactatggtgaattttaccgctttctgacagacgatcgcttgacctcactgtttgaaaacatcgtagattcaatagaaccggataaaaaaacaggggaacgtgttattagccataccgatcttatgtctgaattggcggcgtacgatcaaagacgaagtactgtcttccgtcacatccagcagattgaggatattgtgatctcggggaatgctattctggccaatcctgattgtgataatttttgggtagatggcaaaagaggtgagctcgcaaaacgcaataactttgcaagtctgctgaaaatgatcgatcttataaacacgacaagcttgacggatgacgagcgtacactgctcgtagcaattcggaacgcgttcggtcataatagctatcgagttgacttgaaaaaaatcggcggtataaacaatcttcccgaagttgcaaattctatactcaaacacttggagacccttagtggtttctctgctgaataa

SEQ ID NO: 370 - DNA, 2766 bp, synthetic construct
  source 1..2766: mol_type = other DNA
atgtcgaaaaacgacaacattaagagcaaagccaaagcattaggcttgaaaagtacctttcaggttggggatgaagtagttatgacaagctttggtaaaggaaataaggccattgttgaaaaaattgtcagaggcacagatgtgcaatccgttcctactgaaccaaatttttcagcagaaattgagggaaaaaaatttgaccttgtgggccgcgcacatatacaaactaaaagtgataatccgcagtattctaaaaaacgcaccggcgatgatatgataggtgcaaaagcagccttggaaaagcggttcttcggcggtacatttgacgacaatattcatattcagctcgcgtacaatgtacttgacatcgaaaagattctgagtgtgcacattaataatatcgtatataccctcaacaacattcggcgtaaggataatgccgaagatgatgactttatcggttatatgtccacgagaaatgattatgacacattcattgaaccccgtaaacataatatatcagaagatgcggctaaaagtattgacaagagtagagcatcttttgaagaatatctgcagccgcctgttaaagattgccttcattattttggaaatactttttttgcgccccgtgaaatagaaaagacctataccgataatcgtggttttgaaagaaagaaaaaggtcaccgtgaactcactgattgatgaaaaagaaatctactacatcttcgctctgttagggggtctgcggcagttttgcacccatgacaataaaagcggccgaaattggttatattcactggaagaaaatggcatcaatagtgatgcgaaggcggttttagataagtattacaattctgcggtagctcgcatagatgaatcttttgtagataatgcctctaagaccaacttcaaactgattttcaatgcgatggatgtgtcagatgaggccctgcaggacaatatcgcgaaagcgttttacaaattcacagtgtgtaagtcgttcaaaaatatgggattctcgattaaaaaattacgcgagcaattgttagagttgccagaatatgaaggactcaaagataagcactatgactccgtgcggtcgaaactgtatcagatcatggactttgttatctacctgtctttcaaagacgagaagttcaaaaaagataacgaggagaagatcaacaacattgtcaacgagctccgcgctactctgaacgaagaagataaagggcgggtttatgcatcctatgcagaaagaatgaaatcagagttgaaacccgctatagcccggctcaaatcagatattgacaagattaaggattcacgcgttaaagagtttgaactggacgcaagcgttaagtatcgtctgagcaaagtcgttgaatctgtgagactgaaagatcgagcaacttattttacgaagctgatctatctgactactttattcctggacggtaaagagatcaatgatctcctcaccacgttaattcatcagtttgaaaatatcgccagctttattgacgtgatgaacgatcgtggtatagactgccgtttctccgatgggtacaaacttttcgagtcgtctaaacaaattgcctttgagttacgaaatgtgaacagtttcgcccgcatgacacgcactagtaaagatgacgaaaatgctacccacatgatgtatatagatgctgctgaaatcttaggcactgactataccgaggaacaaattgaggaacatcttaatcttgaaaaaaaacgtatgataccaggaaccaagaaggccgatatgaactttcgtaactttattataaacaacgtgataaaaagcagccggtttaactacctcgtgcgttacagcaatccgaaaaaaatacgagcgttagcggataatgagggcgttatcagatttgtattaggtgaattacctgatgctcagatcgatcgttatactctgctctgtggctttaatccagacgctgatcgccaggaaaaaacagataaactggccaaagcaatcacaggtcttcggtttaatgattttgaaaatgtaaaacagggcgccaacacggaaggggagtcacaggagtctattgataaagcacaaaaacaagggttaatttccctgtacctgacggttttgtatttgcttacgaaaaacctggtatacgtcaacagccgttattttttggcgtttcactgtttagaacgcgatgcccagctgctgggtagtggggctggtcatcacgaaccgtatgtcgcgttgacccagcgctttattaatgaagacaaactgaacgaacatgcgtgcgagtacctgaaaacgaacatagcaaattccgatgagtatacaattcgcatttttcgcaacaatgcggcacatctttctgcagttcgtaatgcaaacctgtatatcgacaaacttaaagagttcaaatcgtactacgaaatctatcactttctgtcacaagagaacatatacgggaagtattgtgtcgataaaaagtatgtgacggctgacgagaatggtagcaaaacgatttctgtcaaaatctccaaggattattgtccgcaggtctatattgataaaagtctggaatatttcgataaactgaacaagtacggtacatactgcaaagatttcacaaaagctttgaactcacctttcggatataatcttgcccgttataagaatcttagcattgaaggcttgtttgatcgtaatcgaccgggagacaaaggtgaaaatacgtttgaggattaa

SEQ ID NO: 371 - DNA, 3189 bp, synthetic construct
  source 1..3189: mol_type = other DNA
atgaacttcgaagaaaatgggaataagtatctttttggagctttcctgaacaccgcgtacgataattataacgaggtgatcagccatatctatgatgttattcgccgaattactaataacaatcctactgaacagaaaagttcatctcaggctttagcatccgaagaaccgatctcttccgaggagaaagaaaagatgttctttgtgtgcactatactgatagcaggcaacgcgacatctcgtaaaatcgaatcaatattaaaacgggcgtttccgttttgggatgattttattgaaatccatgcatccttatcagcccagctggataaaacggagtccatctttcagctgcagaaaaactgcgtagaagagttattcaccgcactggagagttggagaaattacaccacgcattatattcacccagaggcaattgcttctcccaccatcaatttgctgctcaaaagttgcttcaaccagggaattaaagagatcaaaaaacgtttcaacacaaaagatgagcagctgacacatctgtacgagcccgagttgtttcataataaagagaccaacaaagatgaaatcaagtgctatcacccggctaattattatcgttttgctaatgaaaacggtctgctgaccgaaaagggtctggcgttttttacatgtctcttcctgtacaaacgcgagagctatcttctgctgaaccagctgaaaggcttcaaacgtgcggatgaagaacgctatcggatgacgctggaagcgtttactgttatgcgctttcgtgcaccgaaacagcttttgaaacttcaacagcagcagttggataaagtctcattggggatatcgatgattaatgagctggccaagtgcccgaaagaactgtatgactgtttggaaaatgaaaaaagacgacagttcgaagtttacccggatactgaaactacgttatatgaacaagaagcaattggagaactcattcgttataaagatcggtatgaaaatcttatgctcaaagctctggagcatagttcggaatgtaagtacatgggcttttatttgtccctcggtaagtgttatatgaaatgctatgagaaacattatattgacggtactaccgacaatcgttatattgtccatagcctttatggttttgggcgtttacaaaatgcctcgaccgatcataaaaatcatctgagtagctttggtgaagaattacagacacacagccaattacccgtctgtcactttgccactgaggatgatgcggctgatagtcctacaagtgttccttatatttcagagtcatatccgtcttatgttctcaacaataacaatatcgggattaagtggctgaactcttccgaaaaaacggaatacccgaattttaatcttaatgaaggaaaagtttcctgtcctgcccctgattattggctctctaagtatgaactgccggctatggccttttacgcctatcttaaagagaaacacaagaataaactgcaggagtatccatcaattaaggaattaattgaccagagtcatccggaagctaccaaaacttcgagctcgacaatcaaagatagattagaagaacgactgaaacggtataaagtggacgccacgaaaaaactgaaacggttagcagaaaaaccggatggtgttcaaagcggccgactggcggatgaactggcccgggatatattatggctgcaaccaagctctcctaaagaaggcggtaaagataaacttaccggcgccaattttcaagcattacagtatgcactggcccgttatgatttcatgcgcaccgaattaccaagaatattaaccgcggcgcgtctgacgggatcaaataatgcgcatccttttttagataagattaatccacaggactatagccgcctcacagcatattacgcaggctatttgacgcagaaaattgtctacatagataagcaattagaaaaactggctagagggaaggttaacatccaatttcacccgacgcgcaaacttattcgccagtctcaaacagattcagtggaacatgaaaaggaaaccgtctttttaccacgtaatatttttaccgagaaaattgaacaggccctgtgccaaatacagggcaattttaaacttaatattgaaaaagcccgtataagcggcaagaagctgaacgcttctaaactcatattgatctacctggaattatatcttaaggatgaagtgcctgaattttacaatgctaaaagaaagtacccctgtctgtgttatccactgaccccgagcgaaaaatatactctgaaggagtatcaggacacagaggaacggtcgaagcgcattgaccgtctcaaatgtttttacaattttaaagaggtagcagaaaaagtctatcttcacaaggaacttagcgaggacgaaaacaaacgctacagaaagtatatagaggttcagaaagtgatcgataatgaaaaaatcattagactgcgaaaagtgcaggatattacgctttatctttggacacgtctgttcattgaggaaaatcctgagcaaatctttttcagtaagaacgaaaaaccagagaacagtctgttcaaattgcgggaaatgaataatgccatacttgacaataccacgtcacggaaaattaatattaacactcctaacggtaatgtaagcattgaagacgagtttaaaattaaagattatggtcgcgtaacggcactgacaaccgagaagttgccccaatctttaataaagttcatagcgattctcaacaaacccttaaacaaaaaagatcgcccgttattgtcttatgattatatctaccacgagacaaatgcattctaccgctaccgtccggaaattatcaaaatggcgcaggacattgaaaacaaaatcatcaacgaccttaagattaatgtaaaaccacaagccgaatcctactacaactttcgtcgcaccatccagaagctcgagaacaaaagtcgcgacatcaacatcgaattgttaattaaaatccgtaatgcattctgccataacgagtataaggaattagacaacgaccaatacaagtacctgaattcattgtttaaactgtcgtccgacataaaacagactgatacactggcgtatttgttatacattttgttcgagactgagtaccagaaagtgatgatactgaaataa

SEQ ID NO: 372 - DNA, 3873 bp, synthetic construct
  source 1..3873: mol_type = other DNA
atggcaaatacgcagttcaaactgaagtctgttgattattcaaaaccgtacgatgaacagcccgaatgcaaacggcatgtagtgggagcctatgccaatctggcccgacataatatgaccctgactgtgaatacgattatgcaagccattgggatggaaatattcgatgaaaacaatattggagacgcgtttaatagtagtcaccgtaaaaagatcgacgctctggataacattcaaaaagtgaatctgcagaagcggttgtaccgtcatttccccttttttaaacgcatgaaactcgaagatgaagacaaaaagtcggtgcagttaactacactgttagaggttatgagcgacttcacatcatgcatggcgattatacgtaatttttacacacattatcacccatataattcaccggatgagaaaaaaagacagctggaattaaagaaacgaatgggcaaacgcttacagtttctttatgaaaatacatcccaaatgttcaaaactactgaagcacttgaccatgaaagtaatgaagtgttgtccgccctgcgcattcccgaagattacattgaggaaattttaccgggcgacaaagaatacgacaatttgtttaaccttatcaatgatcctcggacgagtaagttcaaaaagcaaggcttgaaactcaaccagcagaccaaagtgattactcgtaaaaaagttcgatttgtacgtaatcctgactatcaggcctacatgattgatgagacaaatggcatgagcgacgtagcaattatattctttctgtgtctttttctggacaaaaaggtctccttcgatatgatggacgaagtgggcttcacgaaacagataaagtttaacggtccgcaggctgatcgtcagctgttgtatctgaaagagataatgtgtatgaacagaatccgtatgaccaaagcaaaacttgatagcgaaatgacagatacggccctggcactcgatatgctcggggaagttcgaaagtgcccaaaagcgttgtatgaggtattagataaagatgcacggaatgaattcaaagatgacgcgacggttcaatgggaaacggaacacggtaaagaagcggtttcgactgaagcgctcgcttctgaatctgatgaagacgagttaaccgacaaaaatacaccgcgctcaacatttgttcgttgggatgatcgttttcctcaaatggccttacgttatattgattatcagggtcttttcaatgacatacgctttcagttgaacctgggtaagtatcgtttcgccttttaccagcatgataacaaacagtctgttgataacgaggaaagattaagaatattacagaaagagttacatgggtttggacgcatccaggaagtagaagaaaaaaagaatgagaagtggaaagaactgtatgacgaaaagaccgtgaaagatggcttaacacagaaaaaaccggatgaggccggtcaggccccgtatatcactgagcagtatgcacaatatgctattgatgagaaatctcactcgattggtctgcgttgggaagggtgggataaaaaagataagagtaaaggccactatggtgatctggacaaactgaagatgtttattccatatatcccgagcaaacctaaagacgaagagcagcaaactaatcaggcggaagatctgatggctccacaagccatgctgaacctgtatgaacttcccgctttactgttttatcagtacctgcttgataagtacaagtcagataccagcgatgcggaagacataattaaaacaagcttcactaatctggttaattttttcaacgacgtcgaatctgatgtcctggttcctatcgatgatcctgatgaaaacgaacgcattgataaactgagttccttactcgagggctataatcttcagatgagcgatataccggagaagttgcgtaactacctttgcaacaaggatattgactatgatctcaaaatggagaaaagcgctattggtcggttagaggagaagaaaaagcaagttgacaaagcgctttctagttataaggacaagaaaaagataattggttcaaaagataacaagtttgacaaaatgcgtgcgtctattaaaacgggacagctggcaacctggttaatacgtgatattatggattgggttccaaataactcctcagcacgcaatcgactgactggacaaaactataccgctttgcaagccacaatggctctctttggccagcaagcgaatagcaacagaagttatcttgaatcctgttttcgttccgctcatcttctgccattagacggtaaaccttatgataaaaacacgcatcatccgtttctcgaagatgtgattcaggcgatggaagacgaaaccttagagtcgttctacgagaaataccttgattttgagaccaaacacatcgataaagtgattaaaactctcgagaacgggacagattttgatgattattataaagtgccttttttgcattgtgatcgtcaacgctgggcaggtcccgacaaaagtttggccgcgcagtatcttaaacgaccgattcagctcccaaatgggatttttaccaagcccgtttttaatctgctgtctacgatcgataacaaagccttaagaaaagcactcgaggaatcccagcaggccaatggagaaaatccgccgctggcaaataacgtcgcgtttctgatgaaactgtactttgagttcgttgagcatgatcattcccaaccgttttattataccacgacgtcagacggcaacaaaagccactatcttcatatctaccgcatcttcaaaaagttgtacggccaaccaataccacactcaaacaaaaccactgtaccggcgtatacaattgacgaaatccgccatctgcgtaaacaggcgatagcagacatcgaagagtatgtagacaatgaaatcgagaaatggaaacgtaccaaacaagacagattcgaatccaagctgcggaaaaagctgaagaaagaaaatgataagcgctacaaaaagcatgaaaagcagctgaacatcaacgaggagatccagaaagttgtgaaaaaagaaatagataccatgcgcacagatatgactagcaaaatgaaacgtcaactgcggtctgtatatgataacgaacggacaattagacggtttaaagctcaggacatgatgcttttagtaatggcacggaatatcttaaaagccaagagtaacgataaagattttacggacggtttttgtttggagaacgttttcagcgattcgttacttgataaacccattgacttcgaatggaaagtcaatatcaaaggtgcttctaagacaatcaagcaggaaggcatgaaaatgaaaaactatggtcagttttacaaatttgcttcagatcaccaacgcttggaatcattactgtcacgcttgccagactcgctgtttcagcgagcagaaatagagaatgaactggcttactacgactcgaatagaagtaaagtctttcggcaagtctatatcattgaatcggaagcatatcgtctgaaacctggcttacaggatgatgccaatgcaagcaaagattggttttactttacggacaaaaaaacccataagcaacgtagtatccgcaatagcttcatacaactcctggaaattctggcggcaggggaagatggaattttggataacgatgagaaaattgctctgcagaaaacccgcaatgcctttggacacaatacttatgatgtggatctgaatgtcgtcttcaagggtaaagaaaataaaaagaagatccctgaggtggcaaatgggatcaaagagaaaattgagacccagaccgaagaattaaaacgccgttctaaataa

SEQ ID NO: 373 - RNA, 120 nt, Alphainfluenzavirus influenzae
  source 1..120: mol_type = viral cRNA
cttgaggctctcatggaatggctaaagacaagaccaatcttgtcacctctgactaagggaattttaggatttgtgttcacgctcaccgtgcccagtgagcgaggactgcagcgtagacgc

SEQ ID NO: 374 - RNA, 30 nt, synthetic construct
  source 1..30: mol_type = other RNA
gactgaaccttaccatgtagggaattgaac

SEQ ID NO: 375 - RNA, 36 nt, synthetic construct
  source 1..36: mol_type = other RNA
gttgtagaagctcttattttgaagggtataacaact

SEQ ID NO: 376 - RNA, 29 nt, synthetic construct
  source 1..29: mol_type = other RNA
atgccttaattttggaaggtgagaacaac

SEQ ID NO: 377 - RNA, 36 nt, synthetic construct
  source 1..36: mol_type = other RNA
gttgtaactgcccttattttgaagggtataaacaac

SEQ ID NO: 378 - RNA, 36 nt, synthetic construct
  source 1..36: mol_type = other RNA
gctgtagaagcctccgatttgtgaggtgatgacagc

SEQ ID NO: 379 - RNA, 38 nt, synthetic construct
  source 1..38: mol_type = other RNA
tagttttattacccctacaaacagggttatattctaac

SEQ ID NO: 380 - RNA, 36 nt, synthetic construct
  source 1..36: mol_type = other RNA
gttgtaactgcccttattttgatgggtaaaaacaac

SEQ ID NO: 381 - RNA, 23 nt, synthetic construct
  source 1..23: mol_type = other RNA
gttgtgcttaccctacaaaatta

SEQ ID NO: 382 - RNA, 36 nt, synthetic construct
  source 1..36: mol_type = other RNA
gttgttgaatgctgcattttgggtagcaattacaac

SEQ ID NO: 383 - RNA, 26 nt, synthetic construct
  source 1..26: mol_type = other RNA
agtccccgctcgtttcggggtggtct

SEQ ID NO: 384 - RNA, 35 nt, synthetic construct
  source 1..35: mol_type = other RNA
gttgtttttattcttcaaaataagagcagttacaa

SEQ ID NO: 385 - RNA, 36 nt, synthetic construct
  source 1..36: mol_type = other RNA
gttgtctttaccctccaaaccaagagcattcacaac

SEQ ID NO: 386 - RNA, 36 nt, synthetic construct
  source 1..36: mol_type = other RNA
gttgtgggtattctgcaaatttagggcaataacaaa

SEQ ID NO: 387 - RNA, 36 nt, synthetic construct
  source 1..36: mol_type = other RNA
cgaattccgaattaacctcgtgtagtgacgtcgttc

SEQ ID NO: 388 - RNA, 36 nt, synthetic construct
  source 1..36: mol_type = other RNA
gttgttttcaccttgcaaatataaggcatttacaac

SEQ ID NO: 389 - RNA, 36 nt, synthetic construct
  source 1..36: mol_type = other RNA
gttgtaactgctcttgttttgaagggtaaacacaac

SEQ ID NO: 390 - RNA, 29 nt, synthetic construct
  source 1..29: mol_type = other RNA
tgctctcagttttggagggtaaacacaac

SEQ ID NO: 391 - RNA, 29 nt, synthetic construct
  source 1..29: mol_type = other RNA
atgccttaattttggaaggtgaaaacaac

SEQ ID NO: 392 - RNA, 36 nt, synthetic construct
  source 1..36: mol_type = other RNA
gctgtacctaccctgcaaatcaggagcctctacagc

SEQ ID NO: 393 - RNA, 38 nt, synthetic construct
  source 1..38: mol_type = other RNA
aagttgtcatacccctcccaacgaggggcttctacaac

SEQ ID NO: 394 - RNA, 36 nt, synthetic construct
  source 1..36: mol_type = other RNA
gttgtagcaacctatattttgttaggaaaagacaac

SEQ ID NO: 395 - RNA, 36 nt, synthetic construct
  source 1..36: mol_type = other RNA
ggactacacccttaccgttgtgtaggggtctaaaac

SEQ ID NO: 396 - RNA, 37 nt, synthetic construct
  source 1..37: mol_type = other RNA
gttcagcatgaccgcttcttttacagcggactgaacc

SEQ ID NO: 397 - RNA, 36 nt, synthetic construct; identical to SEQ ID NO: 389
  source 1..36: mol_type = other RNA

SEQ ID NO: 398 - RNA, 23 nt, synthetic construct
  source 1..23: mol_type = other RNA
ttcaaaataagggcagttacaac

SEQ ID NO: 399 - RNA, 36 nt, synthetic construct
  source 1..36: mol_type = other RNA
gtctaagactaggtaagaattagcggtgtccattgc

SEQ ID NO: 400 - RNA, 36 nt, synthetic construct
  source 1..36: mol_type = other RNA
gctggagcagccctcgatttgcagggtaatcacagc

SEQ ID NO: 401 - RNA, 36 nt, synthetic construct; identical to SEQ ID NO: 377
  source 1..36: mol_type = other RNA

SEQ ID NO: 402 - RNA, 36 nt, synthetic construct
  source 1..36: mol_type = other RNA
gttgtgtgtaacctaaaaaatgagggcaataacaac

SEQ ID NO: 403 - RNA, 36 nt, synthetic construct; identical to SEQ ID NO: 378
  source 1..36: mol_type = other RNA

SEQ ID NO: 404 - RNA, 36 nt, synthetic construct; identical to SEQ ID NO: 380
  source 1..36: mol_type = other RNA

SEQ ID NO: 405 - RNA, 36 nt, synthetic construct; identical to SEQ ID NO: 400
  source 1..36: mol_type = other RNA

SEQ ID NO: 406 - RNA, 35 nt, synthetic construct
  source 1..35: mol_type = other RNA
gttgttctcaccttgcaaataataaggcatataca

SEQ ID NO: 407 - RNA, 36 nt, synthetic construct
  source 1..36: mol_type = other RNA
ggtgtacctgccatgcaaatagatggctttcacacc

SEQ ID NO: 408 - RNA, 36 nt, synthetic construct
  source 1..36: mol_type = other RNA
gctgtaatcaccccgcaaaaccagggttgcttcagc

SEQ ID NO: 409 - RNA, 36 nt, synthetic construct
  source 1..36: mol_type = other RNA
gttgtctttactccacaaactaagagcattcacaac

SEQ ID NO: 410 - RNA, 36 nt, synthetic construct
  source 1..36: mol_type = other RNA
ggtgttttaatctttccaactaaagacttttacacc

SEQ ID NO: 411 - RNA, 26 nt, synthetic construct
  source 1..26: mol_type = other RNA
ccttctttttgaaaggcacaaatacc

SEQ ID NO: 412 - RNA, 36 nt, synthetic construct; identical to SEQ ID NO: 388
  source 1..36: mol_type = other RNA

SEQ ID NO: 413 - RNA, 30 nt, synthetic construct
  source 1..30: mol_type = other RNA
gttgtttttacccttcagaataagagcagt

SEQ ID NO: 414 - RNA, 38 nt, synthetic construct
  source 1..38: mol_type = other RNA
acgttgtcatacccctcctaacgaggggcttctacaac

SEQ ID NO: 415 - RNA, 36 nt, synthetic construct
  source 1..36: mol_type = other RNA
gttgtgaatgccatatttttgaaaggtagaaacaac

SEQ ID NO: 416 - RNA, 36 nt, synthetic construct; identical to SEQ ID NO: 394
  source 1..36: mol_type = other RNA

SEQ ID NO: 417 - RNA, 36 nt, synthetic construct; identical to SEQ ID NO: 382
  source 1..36: mol_type = other RNA

SEQ ID NO: 418 - RNA, 36 nt, synthetic construct; identical to SEQ ID NO: 392
  source 1..36: mol_type = other RNA

SEQ ID NO: 419 - RNA, 38 nt, synthetic construct; identical to SEQ ID NO: 379
  source 1..38: mol_type = other RNA

SEQ ID NO: 420 - RNA, 29 nt, synthetic construct
  source 1..29: mol_type = other RNA
tgctctcagttttggagggtaaacacaac

SEQ ID NO: 421 - RNA, 36 nt, synthetic construct
  source 1..36: mol_type = other RNA
gtcatagaccccttcaatttatgaggggttttgttc

SEQ ID NO: 422 - RNA, 36 nt, synthetic construct
  source 1..36: mol_type = other RNA
gttgtggaagccctcattttgagagggtattacaac

SEQ ID NO: 423 - RNA, 36 nt, synthetic construct
  source 1..36: mol_type = other RNA
gttgtgcttacccttaaaactaagggcagctacaac

SEQ ID NO: 424 - RNA, 36 nt, synthetic construct
  source 1..36: mol_type = other RNA
gttgtaagtgacctcattttggaaggtaaaaacaac

SEQ ID NO: 425 - RNA, 36 nt, synthetic construct
  source 1..36: mol_type = other RNA
gttgtgtatatctcccaaatcagagacagctacaac

SEQ ID NO: 426 - RNA, 36 nt, synthetic construct
  source 1..36: mol_type = other RNA
gttgtttataccttacaaaataaaggctctcacaac

SEQ ID NO: 427 - RNA, 36 nt, synthetic construct
  source 1..36: mol_type = other RNA
cctttggagtactgttatttaacagggttctaaaac

SEQ ID NO: 428 - RNA, 36 nt, synthetic construct
  source 1..36: mol_type = other RNA
gttgtcgaaagccttattttgaagggctattacaac

SEQ ID NO: 429 - RNA, 31 nt, synthetic construct
  source 1..31: mol_type = other RNA
atgactataccagcaatggctggattaaaac

SEQ ID NO: 430 - RNA, 36 nt, synthetic construct
  source 1..36: mol_type = other RNA
gctgtagaggcccccgttttagggggtaggtacagc

SEQ ID NO: 431 - RNA, 36 nt, synthetic construct
  source 1..36: mol_type = other RNA
gctgttactgccccacaaatcgaggcctatcacagc

SEQ ID NO: 432 - RNA, 20 nt, synthetic construct
  source 1..20: mol_type = other RNA
gctgtagaggcccccgattt

SEQ ID NO: 433 - RNA, 35 nt, synthetic construct
  source 1..35: mol_type = other RNA
gttgtgcctacctctcaaatatagggctttcacaa

SEQ ID NO: 434 - RNA, 20 nt, synthetic construct
  source 1..20: mol_type = other RNA
gttgtaaataccctacaaat

SEQ ID NO: 435 - RNA, 36 nt, synthetic construct
  source 1..36: mol_type = other RNA
gaactatagtagtgtaaatttacactactctaaaac

SEQ ID NO: 436 - RNA, 36 nt, synthetic construct
  source 1..36: mol_type = other RNA
gctgttatatccttacctttgtaagggaagtacagc

SEQ ID NO: 437 - RNA, 36 nt, synthetic construct
  source 1..36: mol_type = other RNA
gttgtagttcccttttatttagggatggtgttcagc

SEQ ID NO: 438 - RNA, 36 nt, synthetic construct
  source 1..36: mol_type = other RNA
gttgtaaaatctctcgttttggagaggattaacaac

SEQ ID NO: 439 - RNA, 30 nt, synthetic construct
  source 1..30: mol_type = other RNA
gttgtagaagcctgtcgtttggatgggtat

SEQ ID NO: 440 - RNA, 37 nt, synthetic construct
  source 1..37: mol_type = other RNA
gttgtcatacctacccaaacgataggcttctacaact

SEQ ID NO: 441 - RNA, 36 nt, synthetic construct
  source 1..36: mol_type = other RNA
cttatacaacacccattttcacagtgggtctataac

SEQ ID NO: 442 - RNA, 36 nt, synthetic construct
  source 1..36: mol_type = other RNA
gttgtcataccgctccgaatgaacggcttctacaac

SEQ ID NO: 443 - RNA, 36 nt, synthetic construct
  source 1..36: mol_type = other RNA
gttgtcataccgccccgaatgagcggcttctacaat

SEQ ID NO: 444 - RNA, 36 nt, synthetic construct
  source 1..36: mol_type = other RNA
gctgtcattaccctccaaaacgagggcttctacagc

SEQ ID NO: 445 - RNA, 36 nt, synthetic construct
  source 1..36: mol_type = other RNA
gtttcagaaccccgtaattctacggggttgtagttg

SEQ ID NO: 446 - RNA, 37 nt, synthetic construct
  source 1..37: mol_type = other RNA
gttttagacccctgtgattcaggggtgtagtgaaact

SEQ ID NO: 447 - RNA, 36 nt, synthetic construct
  source 1..36: mol_type = other RNA
gttttaagactgtgcaaattcgcatagctttcaatc

SEQ ID NO: 448 - RNA, 36 nt, synthetic construct
  source 1..36: mol_type = other RNA
gttgtagaagcctgtcgtttggatgggtataacaac

SEQ ID NO: 449 - RNA, 36 nt, synthetic construct
  source 1..36: mol_type = other RNA
gttgtcatacccactcaaattgtgggcttctacaac

SEQ ID NO: 450 - RNA, 35 nt, synthetic construct
  source 1..35: mol_type = other RNA
gtttccatacccactcaaatgcgggcttctgaaac

SEQ ID NO: 451 - RNA, 36 nt, synthetic construct
  source 1..36: mol_type = other RNA
gttgtgtgtgcctttcaaattgaaggcgttcccaac

SEQ ID NO: 452 - RNA, 36 nt, synthetic construct
  source 1..36: mol_type = other RNA
gctgtacttaccatacaaatttatggcttttacagc

SEQ ID NO: 453 - RNA, 36 nt, synthetic construct
  source 1..36: mol_type = other RNA
gtgcgagaccatccccaaatgaaggggaactacacc

SEQ ID NO: 454 - RNA, 36 nt, synthetic construct
  source 1..36: mol_type = other RNA
ggtgtagttcccatttagttggggatgttctcccgc

SEQ ID NO: 455 - RNA, 36 nt, synthetic construct
  source 1..36: mol_type = other RNA
ggtgcagttccccttcatttggggatggtgttgagc

SEQ ID NO: 456 - RNA, 38 nt, synthetic construct
  source 1..38: mol_type = other RNA
tgctgtaacagccctgattttgcagggtaaatacagtc

SEQ ID NO: 457 - RNA, 21 nt, synthetic construct
  source 1..21: mol_type = other RNA
caaaatggagacttcatcagc

SEQ ID NO: 458 - RNA, 27 nt, synthetic construct
  source 1..27: mol_type = other RNA
acctctcaaaatgaggccttcaacaac

SEQ ID NO: 459 - RNA, 36 nt, synthetic construct
  source 1..36: mol_type = other RNA
gttgtagaagcttatcgtttggataggtatgacaac

SEQ ID NO: 460 - RNA, 30 nt, synthetic construct
  source 1..30: mol_type = other RNA
aagactggtatatgaaccagggagacaaca

SEQ ID NO: 461 - RNA, 36 nt, synthetic construct
  source 1..36: mol_type = other RNA
gttgtcatgccgatcctaacgacaggcttctacaac

SEQ ID NO: 462 - RNA, 36 nt, synthetic construct
  source 1..36: mol_type = other RNA
gttgtaaagacctgcactttagtaggaagaaacaac

SEQ ID NO: 463 - RNA, 36 nt, synthetic construct
  source 1..36: mol_type = other RNA
gttgtagaagccgttcattcggagcggtatgacaac

SEQ ID NO: 464 - RNA, 31 nt, synthetic construct
  source 1..31: mol_type = other RNA
gtactacacccattttgcatgggtctaaaac

SEQ ID NO: 465 - RNA, 36 nt, synthetic construct
  source 1..36: mol_type = other RNA
gttgtcttttcctaacaaaatataggttgctacaac

SEQ ID NO: 466 - RNA, 36 nt, synthetic construct
  source 1..36: mol_type = other RNA
gttgtagaagccgctcattcggggcggtatgacaac

SEQ ID NO: 467 - RNA, 59 nt, synthetic construct
  source 1..59: mol_type = other RNA
gatttagactaccccaaaaacgaaggggactaaaactcctaaaattcccttagtcagag
